(19) United States
(12) Patent Application Publication
(10) Pub. No.: US 2023/0355747 A1
(43) Pub. Date: Nov. 9, 2023

(54) COMPOUND FOR INCREASING EFFICACY OF VIRAL VECTORS

(71) Applicant: ABLEVIA BIOTECH GMBH, Wien (AT)

(72) Inventors: Oskar SMRZKA, Wien (AT); Bettina WANKO, Wien (AT)

(21) Appl. No.: 18/246,117

(22) PCT Filed: Sep. 23, 2021
(86) PCT No.: PCT/EP2021/076193

§ 371 Date: Mar. 21, 2023

(30) Foreign Application Priority Data
Sep. 23, 2020 (EP) 20197898.8

(51) Int. Cl. A61K 39/235; A61K 47/64; A61K 47/68

(52) U.S. Cl. CPC A61K 39/235; A61K 47/643; A61K 47/644; A61K 47/6849; A61K 2039/505

(57) ABSTRACT

A compound for the sequestration of undesirable neutralizing antibodies against viral vectors in a patient. The compound includes an inert biopolymer scaffold and at least a first peptide n-mer of the general formula P ( - S - P ) ₍ₙ₋₁₎ and a second peptide n-mer of the general formula P ( - S - P ) ₍ₙ₋₁₎; wherein, P is a peptide with a sequence length of 2-13 amino acids and S is a non-peptide spacer, independently for each of the peptide n-mers, n is an integer of at least 1, each of the peptide n-mers is bound to the biopolymer scaffold. Independently for each occurrence, P has an amino-acid sequence including a sequence fragment with a length of at least six amino acids of a capsid protein sequence of a viral vector. Compositions including the compound and sequestering and inhibiting methods are also provided.

[0001] The field of present invention relates to compounds for increasing efficiency of non-pathogenic viral vectors, such as used in vaccines or in gene therapy.

[0002] Wild-type adeno-associated viruses (AAV) are typically non-pathogenic and only capable of replicating in the presence of helper viruses. One big advantage of this class of viral gene therapy vectors is that they maintain long term, sustained gene expression in the host cell, making them ideal for therapeutic gene delivery. Numerous natural subtypes have been isolated showing serological differences and unique tropism in vivo and in vitro. AAV vectors are well suited for targeting different cell types. Importantly, they typically do not integrate into the genome of the host cell (Colella et al, 2017).

[0003] To date, many different serotypes and variants are well studied including AAV2, AAV5 or AAV8. New gene therapy compositions such e.g. Voretigene neparvove (Luxturna^{®}; based on AAV2) or onasemnogene abeparvovec-xioi (Zolgensma^{®}; based on AAV9) were successfully tested and approved, reflecting the dynamic progress in this field. Li (Li et al, 2020) provides an extensive review about AAV vectors. New concepts of improving gene expression, tissue specificity, genome stability, combined with capsid engineering can be found in Domenger (Domenger et al, 2019).

[0004] Much effort was invested into engineering improved AAV capsid variants to change their biological properties including tropism and safety. However, susceptibility to antibody neutralization by preexisting antibodies of the patient remains a major challenge, see e.g. Costa Verdera et al, 2020.

[0005] Kruzik et al, 2019, investigated the prevalence of neutralizing antibodies against various AAV serotypes in different patient cohorts. It was found, for example, that neutralizing antibodies against AAV2 were most abundant at levels up to 74% of the population. Antibodies against AAV8 were found for example in up to 63%. Natural antibodies against AAV5 (up to 59%) and AAV1 (27%) were less abundant. Interestingly, most people tested exhibited antibodies against more than one serotype. A comprehensive review was published by Ronzitti et al, 2020.

[0006] The consequences were for example that a hemophilia B gene therapy trial with an AAV vector turned out to be problematic because of pre-existing neutralizing antibodies against AAV in patients that did not respond to the therapy. Manno et al., 2006, showed for example that even low titers of neutralizing antibodies could block the effectivity of gene therapy by blocking virus function by opsonization.

[0007] Tseng et al, 2014, reviewed epitopes of anti-AAV antibodies found with human serum and monoclonal antibodies. The interaction between preexisting or induced anti-AAV antibodies and virus capsid proteins has mainly been investigated by mutation analysis, by peptide insertions or by peptide scanning and several approaches were tested to develop AAV variants that improve tropism and that escape humoral immune response. These strategies include directed evolution, structure-based approaches, the engineering of chimeric AAV vectors (for example Bennett et al, 2020) or by displaying peptides of the surface of AAV vectors (Börner et al, 2020). Other proposed strategies to avoid the negative impact of neutralizing antibodies include modifying the route of administration (Mimuro et al, 2013), the discovery of new serotypes and variants (Salganik et al, 2015), the reduction of immunogenicity by PEGylation or polymer technologies (Balakrishnan et al, 2019) or the use of capsid decoys intra- (Mingozzi et al, 2013) or extracorporeally (Bertin et al, 2020). Mechanisms of immunogenicity and their clinical impact were extensively reviewed by Monahan et al, 2021.

[0008] US 2013/0259885 A1 relates to immunomodulation with peptides containing epitopes recognized by CD4+ natural killer T cells. This is taught to be suitable for increasing efficiency of gene therapy. WO 2005/023848 A2 discloses administration of peptides to patients for increasing efficiency of an adenoviral vector.

[0009] WO 2019/018439 A1 relates to the removal of AAV-neutralizing antibodies from a subject by apheresis prior to administering recombinant AAV comprising a heterologous polynucleotide to the subject. Bertin et al, 2020, discloses a similar apheresis approach. Further along similar lines, WO 00/20041 A2 relates to methods of enhancing the effectiveness of therapeutic viral agents by extracorporeal removal of anti-AdV-antibodies with affinity columns based on AdV subunits (i.e. selective apheresis).

[0010] However, each of these approaches have disadvantages on their own.

[0011] Neutralizing antibodies are not only problematic with respect to AAV-based gene therapy or vaccine vectors. To date, Adenovirus (AdV) serotype 5 (Ad5), as the prototypic adenoviral vector, was tested in more than 400 clinical trials. Remarkably, up to 80% of the population carries neutralizing antibodies against Ad5 which has a negative impact on transgene expression or on the efficacy of vaccines against pathogens or cancer.

[0012] Importantly, neutralizing antibodies have recently turned out to be problematic in a clinical trial with a vaccine against SARS-CoV-2: Zhu (Zhu et al, 2020) concluded that pre-existing Ad5 antibodies might have hampered the immune response against the SARS-CoV-2 vaccine. It was further concluded that there was also a negative impact on the duration of the immune response elicited by the vaccine because of pre-existing neutralizing antibodies against the viral vaccine vector.

[0013] Neutralizing antibodies and epitopes against all types of AdV and other viral vectors for vaccination and gene therapy were previously described e.g. in Tian et al, 2018; Wang et al, 2019; Fausther-Bovendo et al, 2014; and Mok et al, 2020). As with AAV vectors, much effort was made to circumvent pre-existing anti vector immunity by engineering and fine mapping of epitopes of adenoviral vectors (Roberts et al, 2006).

[0014] Since such strategies are cumbersome and expensive, new approaches are needed to address the problem of viral vector neutralization.

[0015] It is thus an object of the present invention to provide compounds and methods which inhibit viral vector neutralization. Thereby, efficiency of non-pathogenic viral vectors (such as used in vaccines or in gene therapy) is typically increased.

[0016] The present invention provides a compound comprising
[0017] a biopolymer scaffold and at least
[0018] a first peptide n-mer of the general formula:
$$\text{P} {\left(- \text{S} - \text{P}\right)}_{\left(\text{n-1}\right)} \text{and}$$
[0019] a second peptide n-mer of the general formula:

$$\text{P} {\left(- \text{S} - \text{P}\right)}_{\left(\text{n-1}\right)} \text{.}$$

[0020] Independently for each occurrence, P is a peptide with a sequence length of 6-13 amino acids, and S is a non-peptide spacer. Independently for each of the peptide n-mers, n is an integer of at least 1, preferably of at least 2, more preferably of at least 3, especially of at least 4. Each of the peptide n-mers is bound to the biopolymer scaffold, preferably via a linker each. Further, independently for each occurrence, P has an amino-acid sequence comprising a sequence fragment with a length of at least six, preferably at least seven, more preferably at least eight, especially at least 9 (or 10, 11, 12 or 13) amino acids of a capsid protein sequence of a (non-pathogenic) viral vector (such as AAV or AdV), in particular of an AdV hexon protein sequence, an AdV fiber protein sequence, an AdV penton protein sequence, an AdV IIIa protein sequence, an AdV VI protein sequence, an AdV VIII protein sequence or an AdV IX protein sequence or of any one of the capsid protein sequences identified in FIG. 10 and FIG. 11 or of any one of the capsid protein sequences listed in Cearley et al., 2008. Optionally at most three, preferably at most two, most preferably at least one amino acid of the sequence fragment is independently substituted by any other amino acid.

[0021] Preferably, at least one occurrence of P is Pₐ and/or at least one occurrence of P is P_{b}. Pₐ is a defined peptide (i.e. a peptide of defined sequence) with a sequence length of 6-13 amino acids, preferably 7-11 amino acids, more preferably 7-9 amino acids. P_{b} is a defined peptide (i.e. a peptide of defined sequence) with a sequence length of 6-13 amino acids, preferably 7-11 amino acids, more preferably 7-9 amino acids.

[0022] The present invention also provides a compound comprising
[0023] a biopolymer scaffold and at least
[0024] a first peptide n-mer which is a peptide dimer of the formula Pₐ - S - Pₐ or Pₐ - S - P_{b}, wherein Pₐ is a defined peptide (i.e. a peptide of defined sequence) with a sequence length of 6-13 amino acids, preferably 7-11 amino acids, more preferably 7-9 amino acids, P_{b} is a defined peptide (i.e. a peptide of defined sequence) with a sequence length of 6-13 amino acids, preferably 7-11 amino acids, more preferably 7-9 amino acids, and S is a non-peptide spacer, wherein the first peptide n-mer is bound to the biopolymer scaffold, preferably via a linker. Pₐ has an amino-acid sequence comprising a sequence fragment with a length of at least six, preferably at least seven, more preferably at least eight, especially at least 9 (or 10, 11, 12 or 13) amino acids of a capsid protein sequence of a (non-pathogenic) viral vector, in particular of an AdV hexon protein sequence, an AdV fiber protein sequence, an AdV penton protein sequence, an AdV IIIa protein sequence, an AdV VI protein sequence, an AdV VIII protein sequence or an AdV IX protein sequence or of any one of the capsid protein sequences identified in FIG. 10 and FIG. 11 or of any one of the capsid protein sequences listed in Cearley et al., 2008. Optionally at most three, preferably at most two, most preferably at least one amino acid of the sequence fragment is independently substituted by any other amino acid.

[0025] This compound preferably comprises a second peptide n-mer which is a peptide dimer of the formula P_{b} - S - P_{b} or Pₐ - S -P_{b}, wherein the second peptide n-mer is bound to the biopolymer scaffold, preferably via a linker. P_{b} has an amino-acid sequence comprising a sequence fragment with a length of at least six, preferably at least seven, more preferably at least eight, especially at least 9 (or 10, 11, 12 or 13) amino acids of a capsid protein sequence of a (non-pathogenic) viral vector, in particular of an AdV hexon protein sequence, an AdV fiber protein sequence, an AdV penton protein sequence, an AdV IIIa protein sequence, an AdV VI protein sequence, an AdV VIII protein sequence or an AdV IX protein sequence or of any one of the capsid protein sequences identified in FIG. 10 and FIG. 11 or of any one of the capsid protein sequences listed in Cearley et al., 2008. Optionally at most three, preferably at most two, most preferably at least one amino acid of the sequence fragment is independently substituted by any other amino acid.

[0026] Furthermore, the present invention provides a pharmaceutical composition comprising any one of the aforementioned compounds and at least one pharmaceutically acceptable excipient. Preferably, this pharmaceutical composition is for use in therapy, in particular in combination with a vaccination or gene therapy.

[0027] In another aspect, the present invention provides a method of sequestering (or depleting) one or more antibodies present in an individual, comprising obtaining a pharmaceutical composition as defined herein, the composition being non-immunogenic in the individual, where the one or more antibodies present in the individual are specific for at least one occurrence of P, or for peptide Pₐ and/or peptide P_{b}; and administering the pharmaceutical composition to the individual.

[0028] In yet another aspect, the present invention relates to a pharmaceutical composition (i.e. a vaccine or gene therapy composition), comprising the compound defined herein and further comprising the viral vector and optionally at least one pharmaceutically acceptable excipient. The viral vector typically comprises a peptide fragment with a sequence length of at least six, preferably at least seven, more preferably at least eight, especially at least 9 amino acids. The sequence of at least one occurrence of peptide P, or peptide Pₐ and/or peptide P_{b}, of the compound is at least 70% identical, preferably at least 75% identical, more preferably at least 80% identical, yet more preferably at least 85% identical, even more preferably at least 90% identical, yet even more preferably at least 95% identical, especially completely identical to the sequence of said peptide fragment. Preferably, this pharmaceutical composition is for use in vaccination or gene therapy and/or for use in prevention or inhibition of an undesirable immune reaction against the viral vector.

[0029] In even yet another aspect, the present invention provides a method of inhibiting a (undesirable) - especially humoral -immune reaction to a treatment with a vaccine or gene therapy composition in an individual in need of treatment with the vaccine or gene therapy composition or of inhibiting neutralization of a viral vector in a vaccine or gene therapy composition for an individual in need of treatment with the vaccine or gene therapy composition, comprising obtaining said vaccine or gene therapy composition; wherein the compound of the vaccine or gene therapy composition is non-immunogenic in the individual, and administering the vaccine or gene therapy composition to the individual.

[0030] In the course of the present invention, a compound was developed which is able to deplete (or sequester) antibodies against viral vectors in vivo and is therefore suitable to increase the efficiency of viral vectors.

[0031] Further, it was surprisingly found that the approach which is also used in the invention is particularly effective in reducing titres of undesired antibodies in an individual. In particular, the compound achieved especially good results with regard to selectivity, duration of titre reduction and/or level of titre reduction in an in vivo model (see experimental examples).

[0032] The detailed description given below relates to all of the above aspects of the invention unless explicitly excluded.

[0033] In general, antibodies are essential components of the humoral immune system, offering protection from infections by foreign organisms including bacteria, viruses, fungi or parasites. However, under certain circumstances - including autoimmune diseases, organ transplantation, blood transfusion or upon administration of biomolecular drugs or gene delivery vectors - antibodies can target the patient’s own body (or the foreign tissue or cells or the biomolecular drug or vector just administered), thereby turning into harmful or disease-causing entities. Certain antibodies can also interfere with probes for diagnostic imaging. In the following, such antibodies are generally referred to as “undesired antibodies” or “undesirable antibodies”.

[0034] With few exceptions, selective removal of undesired antibodies has not reached clinical practice. It is presently restricted to very few indications: One of the known techniques for selective antibody removal (although not widely established) is immunoapheresis. In contrast to immunoapheresis (which removes immunoglobulin), selective immunoapheresis involves the filtration of plasma through an extracorporeal, selective antibody-adsorber cartridge that will deplete the undesired antibody based on selective binding to its antigen binding site. Selective immunoapheresis has for instance been used for removing anti-A or anti-B antibodies from the blood prior to AB0-incompatible transplantation or with respect to indications in transfusion medicine (Teschner et al). Selective apheresis was also experimentally applied in other indications, such as neuroimmunological indications (Tetala et al) or myasthenia gravis (Lazaridis et al), but is not yet established in the clinical routine. One reason that selective immunoapheresis is only hesitantly applied is the fact that it is a cost intensive and cumbersome intervention procedure that requires specialized medical care. Moreover, it is not known in the prior art how to deplete undesired antibodies rapidly and efficiently.

[0035] Unrelated to apheresis, Morimoto et al. discloses dextran as a generally applicable multivalent scaffold for improving immunoglobulin-binding affinities of peptide and peptidomimetic ligands such as the FLAG peptide. WO 2011/130324 A1 relates to compounds for prevention of cell injury. EP 3 059 244 A1 relates to a C-met protein agonist.

[0036] As mentioned, apheresis is applied extracorporeally. By contrast, also several approaches to deplete undesirable antibodies intracorporeally were proposed in the prior art, mostly in connection with certain autoimmune diseases involving autoantibodies or anti-drug antibodies:

[0037] Lorentz et al discloses a technique whereby erythrocytes are charged in situ with a tolerogenic payload driving the deletion of antigen-specific T cells. This is supposed to ultimately lead to reduction of the undesired humoral response against a model antigen. A similar approach is proposed in Pishesha et al. In this approach, erythrocytes are loaded ex vivo with a peptide-antigen construct that is covalently bound to the surface and reinjected into the animal model for general immunotolerance induction.

[0038] WO 92/13558 A1 relates to conjugates of stable nonimmunogenic polymers and analogs of immunogens that possess the specific B cell binding ability of the immunogen and which, when introduced into individuals, induce humoral anergy to the immunogen. Accordingly, these conjugates are disclosed to be useful for treating antibody-mediated pathologies that are caused by foreign- or self-immunogens. In this connection, see also EP 0 498 658 A2.

[0039] Taddeo et al discloses selectively depleting antibody producing plasma cells using anti-CD138 antibody derivatives fused to an ovalbumin model antigen thereby inducing receptor crosslinking and cell suicide in vitro selectively in those cells that express the antibody against the model antigen.

[0040] Apitope International NV (Belgium) is presently developing soluble tolerogenic T-cell epitope peptides which may lead to expression of low levels of co-stimulatory molecules from antigen presenting cells inducing tolerance, thereby suppressing antibody response (see e.g. Jansson et al). These products are currently under preclinical and early clinical evaluation, e.g. in multiple sclerosis, Grave’s disease, intermediate uveitis, and other autoimmune conditions as well as Factor VIII intolerance.

[0041] Similarly, Selecta Biosciences, Inc. (USA) is currently pursuing strategies of tolerance induction by so-called Synthetic Vaccine Particles (SVPs). SVP-Rapamycin is supposed to induce tolerance by preventing undesired antibody production via selectively inducing regulatory T cells (see Mazor et al).

[0042] Mingozzi et al discloses decoy adeno-associated virus (AAV) capsids that adsorb antibodies but cannot enter a target cell.

[0043] WO 2015/136027 A1 discloses carbohydrate ligands presenting the minimal Human Natural Killer-1 (HNK-1) epitope that bind to anti-MAG (myelin-associated glycoprotein) IgM antibodies, and their use in diagnosis as well as for the treatment of anti-MAG neuropathy. WO 2017/046172 A1 discloses further carbohydrate ligands and moieties, respectively, mimicking glycoepitopes comprised by glycosphingolipids of the nervous system which are bound by anti-glycan antibodies associated with neurological diseases. The document further relates to the use of these carbohydrate ligands/moieties in diagnosis as well as for the treatment of neurological diseases associated with anti-glycan antibodies.

[0044] US 2004/0258683 A1 discloses methods for treating systemic lupus erythematosus (SLE) including renal SLE and methods of reducing risk of renal flare in individuals with SLE, and methods of monitoring such treatment. One disclosed method of treating SLE including renal SLE and reducing risk of renal flare in an individual with SLE involves the administration of an effective amount of an agent for reducing the level of anti-double-stranded DNA (dsDNA) antibody, such as a dsDNA epitope as in the form of an epitope-presenting carrier or an epitope-presenting valency platform molecule, to the individual.

[0045] US Pat. no. 5,637,454 relates to assays and treatments of autoimmune diseases. Agents used for treatment might include peptides homologous to the identified antigenic, molecular mimicry sequences. It is disclosed that these peptides could be delivered to a patient in order to decrease the amount of circulating antibody with a particular specificity.

[0046] US 2007/0026396 A1 relates to peptides directed against antibodies, which cause cold-intolerance, and the use thereof. It is taught that by using the disclosed peptides, in vivo or ex vivo neutralization of undesired autoantibodies is possible. A comparable approach is disclosed in WO 1992/014150 A1 or in WO 1998/030586 A2.

[0047] WO 2018/102668 A1 discloses a fusion protein for selective degradation of disease-causing or otherwise undesired antibodies. The fusion protein (termed “Seldeg”) includes a targeting component that specifically binds to a cell surface receptor or other cell surface molecule at near-neutral pH, and an antigen component fused directly or indirectly to the targeting component. Also disclosed is a method of depleting a target antigen-specific antibody from a patient by administering to the patient a Seldeg having an antigen component configured to specifically bind the target antigen-specific antibody.

[0048] WO 2015/181393 A1 concerns peptides grafted into sunflower-trypsin-inhibitor- (SFTI-) and cyclotide-based scaffolds. These peptides are disclosed to be effective in autoimmune disease, for instance citrullinated fibrinogen sequences that are grafted into the SFTI scaffold have been shown to block autoantibodies in rheumatoid arthritis and inhibit inflammation and pain. These scaffolds are disclosed to be non-immunogenic.

[0049] Erlandsson et al discloses in vivo clearing of idiotypic antibodies with anti-idiotypic antibodies and their derivatives.

[0050] Berlin Cures Holding AG (Germany) has proposed an intravenous broad spectrum neutralizer DNA aptamer (see e.g. WO 2016/020377 A1 and WO 2012/000889 A1) for the treatment of dilated cardiomyopathy and other GPCR-autoantibody related diseases that in high dosage is supposed to block autoantibodies by competitive binding to the antigen binding regions of autoantibodies. In general, aptamers did not yet achieve a breakthrough and are still in a preliminary stage of clinical development. The major concerns are still biostability and bioavailability, constraints such as nuclease sensitivity, toxicity, small size and renal clearance. A particular problem with respect to their use as selective antibody antagonists are their propensity to stimulate the innate immune response.

[0051] WO 00/33887 A2 discloses methods for reducing circulating levels of antibodies, particularly disease-associated antibodies. The methods entail administering effective amounts of epitope-presenting carriers to an individual. In addition, ex vivo methods for reducing circulating levels of antibodies are disclosed which employ epitope-presenting carriers.

[0052] US 6,022,544 A relates to a method for reducing an undesired antibody response in a mammal by administering to the mammal a non-immunogenic construct which is free of high molecular weight immunostimulatory molecules. The construct is disclosed to contain at least two copies of a B cell membrane immunoglobulin receptor epitope bound to a pharmaceutically acceptable non-immunogenic carrier.

[0053] However, the approaches to deplete undesirable antibodies intracorporeally disclosed in the prior art have many shortcomings. In particular, neither of them has been approved for regular clinical use.

[0054] The biopolymer scaffold used in the present invention may be a mammalian biopolymer such as a human biopolymer, a non-human primate biopolymer, a sheep biopolymer, a pig biopolymer, a dog biopolymer or a rodent biopolymer. In particular the biopolymer scaffold is a protein, especially a (non-modified or non-modified with respect to its amino-acid sequence) plasma protein. Preferably, the biopolymer scaffold is a mammalian protein such as a human protein, a non-human primate protein, a sheep protein, a pig protein, a dog protein or a rodent protein. Typically, the biopolymer scaffold is a non-immunogenic and/or non-toxic protein that preferably circulates in the plasma of healthy (human) individuals and can e.g. be efficiently scavenged or recycled by scavenging receptors, such as e.g. present on myeloid cells or on liver sinusoidal endothelial cells (reviewed by Sorensen et al 2015).

[0055] According to a particular preference, the biopolymer scaffold is a (preferably human) globulin, preferably selected from the group consisting of immunoglobulins, alphal-globulins, alpha2-globulins and beta-globulins, in particular immunoglobulin G, haptoglobin and transferrin. Haptoglobin in particular has several advantageous properties, as shown in Examples 5-9, especially an advantageous safety profile.

[0056] The biopolymer scaffold may also be (preferably human) albumin, hemopexin, alpha-1-antitrypsin, C1 esterase inhibitor, lactoferrin or non-immunogenic (i.e. non-immunogenic in the individual to be treated) fragments of all of the aforementioned proteins, including the globulins.

[0057] In another preference, the biopolymer scaffold is an anti-CD163 antibody (i.e. an antibody specific for a CD163 protein) or CD163-binding fragment thereof.

[0058] Human CD163 (Cluster of Differentiation 163) is a 130 kDa membrane glycoprotein (formerly called M130) and prototypic class I scavenger receptor with an extracellular portion consisting of nine scavenger receptor cysteine-rich (SRCR) domains that are responsible for ligand binding. CD163 is an endocytic receptor present on macrophages and monocytes, it removes hemoglobin/haptoglobin complexes from the blood but it also plays a role in anti-inflammatory processes and wound healing. Highest expression levels of CD163 are found on tissue macrophages (e.g. Kupffer cells in the liver) and on certain macrophages in spleen and bone marrow. Because of its tissue-and cell-specific expression and entirely unrelated to depletion of undesirable antibodies, CD163 is regarded as a macrophage target for drug delivery of e.g. immunotoxins, liposomes or other therapeutic compound classes (Skytthe et al., 2020).

[0059] Monoclonal anti-CD163 antibodies and the SRCR domains they are binding are for instance disclosed in Madsen et al., 2004, in particular FIG. 7. Further anti-CD163 antibodies and fragments thereof are e.g. disclosed in WO 2002/032941 A2 or WO 2011/039510 A2. At least two structurally different binding sites for ligands were mapped by using domain-specific antibodies such as e.g. monoclonal antibody (mAb) EDhul (see Madsen et al, 2004). This antibody binds to the third SRCR of CD163 and competes with hemoglobin/haptoglobin binding to CD163. Numerous other antibodies against different domains of CD163 were previously described in the literature, including Mac2-158, KiM8, GHI/61 and RM3/1, targeting SRCR domains 1, 3, 7 and 9, respectively. In addition, conserved bacterial binding sites were mapped and it was demonstrated that certain antibodies were able to inhibit either bacterial binding but not hemoglobin/haptoglobin complex binding and vice versa. This points to different modes of binding and ligand interactions of CD163 (Fabriek et al, 2009; see also citations therein).

[0060] Entirely unrelated to depletion of undesirable antibodies, CD163 was proposed as a target for cell-specific drug delivery because of its physiological properties. Tumor-associated macrophages represent one of the main targets where the potential benefit of CD163-targeting is currently explored. Remarkably, numerous tumors and malignancies were shown to correlate with CD163 expression levels, supporting the use of this target for tumor therapy. Other proposed applications include CD163 targeting by anti-drug conjugates (ADCs) in chronic inflammation and neuroinflammation (reviewed in Skytthe et al., 2020). Therefore, CD163-targeting by ADCs notably with dexamethasone or stealth liposome conjugates represents therapeutic principle which is currently studied (Graversen et al., 2012; Etzerodt et al., 2012).

[0061] In that context, there are references indicating that anti-CD163 antibodies can be rapidly internalized by endocytosis when applied in vivo. This was shown for example for monoclonal antibody (mAb) Ed-2 (Dijkstra et al., 1985; Graversen et al., 2012) or for mAb Mac2-158 / KN2/NRY (Granfeldt et al., 2013). Based on those observations in combination with observations made in the course of the present invention (see in particular example section), anti-CD163 antibodies and CD163-binding turned out to be highly suitable biopolymer scaffolds for depletion/sequestration of undesirable antibodies.

[0062] Numerous anti-CD163 antibodies and CD163-binding fragments thereof are known in the art (see e.g. above). These are suitable to be used as a biopolymer scaffold for the present invention. For instance, any anti-CD163 antibody or fragment thereof mentioned herein or in WO 2011/039510 A2 (which is included herein by reference) may be used as a biopolymer scaffold in the invention. Preferably, the biopolymer scaffold of the inventive compound is antibody Mac2-48, Mac2-158, 5C6-FAT, BerMac3, or E10B10 as disclosed in WO 2011/039510, in particular humanised Mac2-48 or Mac2-158 as disclosed in WO 2011/039510 A2.

[0063] In a preferred embodiment, the anti-CD163 antibody or CD163-binding fragment thereof comprises a heavy-chain variable (V_{H}) region comprising one or more complementarity-determining region (CDR) sequences selected from the group consisting of SEQ ID NOs: 11-13 of WO 2011/039510 A2.

[0064] In addition, or alternatively thereto, in a preferred embodiment, the anti-CD163 antibody or CD163-binding fragment thereof comprises a light-chain variable (V_{L}) region comprising one or more CDR sequences selected from the group consisting of SEQ ID NOs: 14-16 of WO 2011/039510 A2 or selected from the group consisting of SEQ ID NOs:17-19 of WO 2011/039510 A2.

[0065] In a further preferred embodiment, the anti-CD163 antibody or CD163-binding fragment thereof comprises a heavy-chain variable (V_{H}) region comprising or consisting of the amino acid sequence of SEQ ID NO: 20 of WO 2011/039510 A2.

[0066] In addition, or alternatively thereto, in a preferred embodiment, the anti-CD163 antibody or CD163-binding fragment thereof comprises a light-chain variable (V_{L}) region comprising or consisting of the amino acid sequence of SEQ ID NO: 21 of WO 2011/039510 A2.

[0067] In a further preferred embodiment, the anti-CD163 antibody or CD163-binding fragment thereof comprises a heavy-chain variable (V_{H}) region comprising or consisting of the amino acid sequence of SEQ ID NO: 22 of WO 2011/039510 A2.

[0068] In addition, or alternatively thereto, in a preferred embodiment, the anti-CD163 antibody or CD163-binding fragment thereof comprises a light-chain variable (V_{L}) region comprising or consisting of the amino acid sequence of SEQ ID NO: 23 of WO 2011/039510 A2.

[0069] In a further preferred embodiment, the anti-CD163 antibody or CD163-binding fragment thereof comprises a heavy-chain variable (V_{H}) region comprising or consisting of the amino acid sequence of SEQ ID NO: 24 of WO 2011/039510 A2.

[0070] In addition, or alternatively thereto, in a preferred embodiment, the anti-CD163 antibody or CD163-binding fragment thereof comprises a light-chain variable (V_{L}) region comprising or consisting of the amino acid sequence of SEQ ID NO: 25 of WO 2011/039510 A2.

[0071] In the context of the present invention, the anti-CD163 antibody may be a mammalian antibody such as a humanized or human antibody, a non-human primate antibody, a sheep antibody, a pig antibody, a dog antibody or a rodent antibody. In embodiments, the anti-CD163 antibody may monoclonal.

[0072] According to a preference, the anti-CD163 antibody is selected from IgG, IgA, IgD, IgE and IgM.

[0073] According to a further preference, the CD163-binding fragment is selected from a Fab, a Fab′, a F(ab)2, a Fv, a single-chain antibody, a nanobody and an antigen-binding domain.

[0074] CD163 amino acid sequences are for instance disclosed in WO 2011/039510 A2 (which is included here by reference). In the context of the present invention, the anti-CD163 antibody or CD163-binding fragment thereof is preferably specific for a human CD163, especially with the amino acid sequence of any one of SEQ ID NOs: 28-31 of WO 2011/039510 A2.

[0075] In a further preferred embodiment, the anti-CD163 antibody or CD163-binding fragment thereof is specific for the extracellular region of CD163 (e.g. for human CD163: amino acids 42-1050 of UniProt Q86VB7, sequence version 2), preferably for an SRCR domain of CD163, more preferably for any one of SRCR domains 1-9 of CD163 (e.g. for human CD163: amino acids 51-152, 159-259, 266-366, 373-473, 478-578, 583-683, 719-819, 824-926 and 929-1029, respectively, of UniProt Q86VB7, sequence version 2), even more preferably for any one of SRCR domains 1-3 of CD163 (e.g. for human CD163: amino acids 51-152, 159-259, 266-366, and 373-473, respectively, of UniProt Q86VB7, sequence version 2), especially for SRCR domain 1 of CD163 (in particular with the amino acid sequence of any one of SEQ ID NOs: 1-8 of WO 2011/039510 A2, especially SEQ ID NO: 1 of WO 2011/039510 A2).

[0076] In a particular preference, the anti-CD163 antibody or CD163-binding fragment thereof is capable of competing for binding to (preferably human) CD163 with a (preferably human) hemoglobin-haptoglobin complex (e.g. in an ELISA).

[0077] In another particular preference, the anti-CD163 antibody or CD163-binding fragment thereof is capable of competing for binding to human CD163 with any of the anti-human CD163 mAbs disclosed herein, in particular Mac2-48 or Mac2-158 as disclosed in WO 2011/039510 A2.

[0078] In yet another particular preference, the anti-CD163 antibody or CD163-binding fragment thereof is capable of competing for binding to human CD163 with an antibody having a heavy chain variable (VH) region consisting of the amino acid sequence

DVQLQESGPGLVKPSQSLSLTCTVTGYSITSDYAWNWIRQFPGNKLEWMG
YITYSGITNYNPSLKSQISITRDTSKNQFFLQLNSVTTEDTATYYCVSGT
YYFDYWGQGTTLTVSS (SEQ ID NO: 1),

[0079] and having a light-chain variable (VL) region consisting of the amino acid sequence

SVVMTQTPKSLLISIGDRVTITCKASQSVSSDVAWFQQKPGQSPKPLIYY
ASNRYTGVPDRFTGSGYGTDFTFTISSVQAEDLAVYFCGQDYTSPRTFGG
GTKLEIKRA (SEQID NO: 2) (e.g. in an ELISA).

[0080] Details on competitive binding experiments are known to the person of skilled in the art (e.g. based on ELISA) and are for instance disclosed in WO 2011/039510 A2 (which is included herein by reference).

[0081] The epitopes of antibodies E10B10 and Mac2-158 as disclosed in WO 2011/039510 were mapped (see example section). These epitopes are particularly suitable for binding of the anti-CD163 antibody (or CD163-binding fragment thereof) of the inventive compound.

[0082] Accordingly, in particularly preferred embodiment, the anti-CD163 antibody or CD163-binding fragment thereof is specific for peptide consisting of 7-25, preferably 8-20, even more preferably 9-15, especially 10-13 amino acids, wherein the peptide comprises the amino acid sequence CSGRVEVKVQEEWGTVCNNGWSMEA (SEQ ID NO: 3) or a 7-24 amino-acid fragment thereof. Preferably, this peptide comprises the amino acid sequence GRVEVKVQEEW (SEQ ID NO: 4), WGTVCNNGWS (SEQ ID NO: 5) or WGTVCNNGW (SEQ ID NO: 6). More preferably, the peptide comprises an amino acid sequence selected from EWGTVCNNGWSME (SEQ ID NO: 7), QEEWGTVCNNGWS (SEQ ID NO: 8), WGTVCNNGWSMEA (SEQ ID NO: 9), EEWGTVCNNGWSM (SEQ ID NO: 10), VQEEWGTVCNNGW (SEQ ID NO: 11), EWGTVCNNGW (SEQ ID NO: 12) and WGTVCNNGWS (SEQ ID NO: 5). Even more preferably, the peptide consists of an amino acid sequence selected from EWGTVCNNGWSME (SEQ ID NO: 7), QEEWGTVCNNGWS (SEQ ID NO: 8), WGTVCNNGWSMEA (SEQ ID NO: 9), EEWGTVCNNGWSM (SEQ ID NO:10), VQEEWGTVCNNGW (SEQ ID NO: 11), EWGTVCNNGW (SEQ ID NO: 12) and WGTVCNNGWS (SEQ ID NO: 5), optionally with an N-terminal and/or C-terminal cysteine residue.

[0083] Accordingly, in another particularly preferred embodiment, the anti-CD163 antibody or CD163-binding fragment thereof is specific for a peptide consisting of 7-25, preferably 8-20, even more preferably 9-15, especially 10-13 amino acids, wherein the peptide comprises the amino acid sequence DHVSCRGNESALWDCKHDGWG (SEQ ID NO: 13) or a 7-20 amino-acid fragment thereof. Preferably, this peptide comprises the amino acid sequence ESALW (SEQ ID NO: 14) or ALW. More preferably, the peptide comprises an amino acid sequence selected from ESALWDC (SEQ ID NO: 15), RGNESALWDC (SEQ ID NO: 16), SCRGNESALW (SEQ ID NO: 17), VSCRGNESALWDC (SEQ ID NO: 18), ALWDCKHDGW (SEQ ID NO: 19), DHVSCRGNESALW (SEQ ID NO: 20), CRGNESALWD (SEQ ID NO: 21), NESALWDCKHDGW (SEQ ID NO: 22) and ESALWDCKHDGWG (SEQ ID NO: 23). Even more preferably, the peptide consists of an amino acid sequence selected from ESALWDC (SEQ ID NO: 15), RGNESALWDC (SEQ ID NO: 16), SCRGNESALW (SEQ ID NO: 17), VSCRGNESALWDC (SEQ ID NO: 18), ALWDCKHDGW (SEQ ID NO: 19), DHVSCRGNESALW (SEQ ID NO: 20), CRGNESALWD (SEQ ID NO: 21), NESALWDCKHDGW (SEQ ID NO: 22) and ESALWDCKHDGWG (SEQ ID NO: 23), optionally with an N-terminal and/or C-terminal cysteine residue.

[0084] Accordingly, in another particularly preferred embodiment, the anti-CD163 antibody or CD163-binding fragment thereof is specific for a peptide consisting of 7-25, preferably 8-20, even more preferably 9-15, especially 10-13 amino acids, wherein the peptide comprises the amino acid sequence SSLGGTDKELRLVDGENKCS (SEQ ID NO: 24) or a 7-19 amino-acid fragment thereof. Preferably, this peptide comprises the amino acid sequence SSLGGTDKELR (SEQ ID NO: 25) or SSLGG (SEQ ID NO: 26). More preferably, the peptide comprises an amino acid sequence selected from SSLGGTDKELR (SEQ ID NO: 25), SSLGGTDKEL (SEQ ID NO: 27), SSLGGTDKE (SEQ ID NO: 28), SSLGGTDK (SEQ ID NO: 29), SSLGGTD (SEQ ID NO: 30), SSLGGT (SEQ ID NO: 31) and SSLGG (SEQ ID NO: 26). Even more preferably, the peptide consists of an amino acid sequence selected from SSLGGTDKELR (SEQ ID NO: 25), SSLGGTDKEL (SEQ ID NO: 27), SSLGGTDKE (SEQ ID NO: 28), SSLGGTDK (SEQ ID NO: 29), SSLGGTD (SEQ ID NO: 30), SSLGGT (SEQ ID NO: 31) and SSLGG (SEQ ID NO: 26), optionally with an N-terminal and/or C-terminal cysteine residue.

[0085] The peptides (or peptide n-mers) are preferably covalently conjugated (or covalently bound) to the biopolymer scaffold via a (non-immunogenic) linker known in the art such as for example amine-to-sulfhydryl linkers and bifunctional NHS-PEG-maleimide linkers or other linkers known in the art. Alternatively, the peptides (or peptide n-mers) can be bound to the epitope carrier scaffold e.g. by formation of a disulfide bond between the protein and the peptide (which is also referred to as “linker” herein), or using non-covalent assembly techniques, spontaneous isopeptide bond formation or unnatural amino acids for bio-orthogonal chemistry via genetic code expansion techniques (reviewed by Howarth et al 2018 and Lim et al 2016). Covalent and non-covalent bioconjugation strategies suitable for the present invention are also discussed e.g. in Sunasee et al, 2014.

[0086] The compound of the present invention may comprise e.g. at least two, preferably between 3 and 40 copies of one or several different peptides (which may be present in different forms of peptide n-mers as disclosed herein). The compound may comprise one type of epitopic peptide (in other words: antibody-binding peptide or paratope-binding peptide), however the diversity of epitopic peptides bound to one biopolymer scaffold molecule can be a mixture of e.g. up to 8 different epitopic peptides.

[0087] Typically, since the peptides present in the inventive compound specifically bind to selected undesired antibodies, their sequence is usually selected and optimized such that they provide specific binding in order to guarantee selectivity of undesired antibody depletion from the blood. For this purpose, the peptide sequence of the peptides typically corresponds to the entire epitope sequence or portions of the undesired antibody epitope. The peptides used in the present invention can be further optimized by exchanging one, two or up to four amino-acid positions, allowing e.g. for modulating the binding affinity to the undesired antibody that needs to be depleted. Such single or multiple amino-acid substitution strategies that can provide “mimotopes” with increased binding affinity and are known in the field and were previously developed using phage display strategies or peptide microarrays. In other words, the peptides used in the present invention do not have to be completely identical to the native epitope sequences of the undesired antibodies.

[0088] Typically, the peptides used in the compound of the present invention (e.g. peptide P or Pₐ or P_{b}) are composed of one or more of the 20 amino acids commonly present in mammalian proteins. In addition, the amino acid repertoire used in the peptides may be expanded to post-translationally modified amino acids e.g. affecting antigenicity of proteins such as post translational modifications, in particular oxidative post translational modifications (see e.g. Ryan 2014) or modifications to the peptide backbone (see e.g. Müller 2018), or to non-natural amino acids (see e.g. Meister et al 2018). These modifications may also be used in the peptides e.g. to adapt the binding interaction and specificity between the peptide and the variable region of an undesired antibody. In particular, epitopes (and therefore the peptides used in the compound of the present invention) can also contain citrulline as for example in autoimmune diseases. Furthermore, by introducing modifications into the peptide sequence the propensity of binding to an HLA molecule may be reduced, the stability and the physicochemical characteristics may be improved or the affinity to the undesired antibody may be increased.

[0089] In many cases, the undesired antibody that is to be depleted is oligo- or polyclonal (e.g. autoantibodies, ADAs or alloantibodies are typically poly- or oligoclonal), implying that undesired (polyclonal) antibody epitope covers a larger epitopic region of a target molecule. To adapt to this situation, the compound of the present invention may comprise a mixture of two or several epitopic peptides (in other words: antibody-binding peptides or paratope-binding peptides), thereby allowing to adapt to the polyclonality or oligoclonality of an undesired antibody.

[0090] Such poly-epitopic compounds of the present invention can effectively deplete undesired antibodies and are more often effective than mono-epitopic compounds in case the epitope of the undesired antibody extends to larger amino acid sequence stretches.

[0091] It is advantageous if the peptides used for the inventive compound are designed such that they will be specifically recognized by the variable region of the undesired antibodies to be depleted. The sequences of peptides used in the present invention may e.g. be selected by applying fine epitope mapping techniques (i.e. epitope walks, peptide deletion mapping, amino acid substitution scanning using peptide arrays such as described in Carter et al 2004, and Hansen et al 2013) on the undesired antibodies.

[0092] According to a preferred embodiment, the viral vector is an AdV vector or an AAV vector, preferably specific for a human host.

[0093] In another preference, the sequence fragment as used herein comprises an epitope or epitope part (e.g. at least six, especially at least seven or even at least eight amino acids) of an AdV capsid protein or of an AAV capsid protein (see e.g. Example 10), in particular wherein the AAV is one of AAV-8, AAV-9, AAV-6, AAV-2 or AAV-5, or of one of the following viral proteins identified by their UniProt accession code:
[0094] A9RAI0, B5SUY7, 041855, 056137, 056139, P03135, P04133, P04882, P08362, P10269, P12538, P69353, Q5Y9B2, Q5Y9B4, Q65311, Q6JC40, Q6VGT5, Q8JQF8, Q8JQG0, Q98654, Q9WBP8, Q9YIJ1,
[0095] or of an AdV hexon protein, an AdV fiber protein, an AdV penton protein, an AdV IIIa protein, an AdV VI protein, an AdV VIII protein or an AdV IX protein or of any one of the capsid proteins identified in FIG. 10 and FIG. 11 or of any one of the capsid proteins listed in Cearley et al., 2008.
Particularly suitable epitopes for depleting neutralizing antibodies (against AAV and AdV) were found in epitope screens and screens of human sera (see in particular Examples 14-21). Accordingly, in a preferment, the sequence fragment as used herein comprises a sequence of at least 4 or at least 5 or at least 6, preferably at least 7, more preferably at least 8, even more preferably at least 9, yet even more preferably at least 10 consecutive amino acids selected from:
[0096] the group of AdV sequences ETGPPTVPFLTPPF (SEQ ID NO: 32), HDSKLSIATQGPL (SEQ ID NO: 33), LNLRLGQGPLFINSAHNLDINY (SEQ ID NO: 34), VDPMDEPTLLYVLFEVFDVV (SEQ ID NO: 35), MKRARPSEDTFNPVYPYD (SEQ ID NO: 36), ISGTVQSAHLIIRFD (SEQ ID NO: 37), LGQGPLFINSAHNLDINYNKGLYLF (SEQ ID NO: 38), SYPFDAQNQLNLRLGQGPLFIN (SEQ ID NO: 39), GDTTPSAYSMSFSWDWSGHNYIN (SEQ ID NO: 40), VLLNNSFLDPEYWNFRN (SEQ ID NO: 41), HNYINEIFATSSYTFSYIA (SEQ ID NO: 42), DEAATALEINLEEEDDDNEDEVDEQAEQQKTH (SEQ ID NO: 43), INLEEEDDDNEDEVDEQAEQ (SEQ ID NO: 44), DNEDEVDEQAEQQKTHVF (SEQ ID NO: 45), EWDEAATALEINLEE (SEQ ID NO: 46), PKVVLYSEDVDIETPDTHISYMP (SEQ ID NO: 47), YIPESYKDRMYSFFRNF (SEQ ID NO: 48), DSIGDRTRYFSMW (SEQ ID NO: 49), SYKDRMYSFFRNF (SEQ ID NO: 50), and FLVQMLANYNIGYQGFY (SEQ ID NO: 51), or
[0097] the group of AAV sequences WQNRDVYLQGPIWAKIP (SEQ ID NO: 52), DNTYFGYSTPWGYFDFNRFHC (SEQ ID NO: 53), MANQAKNWLPGPCY (SEQ ID NO: 54), LPYVLGSAHQGCLPPFP (SEQ ID NO: 55), NGSQAVGRSSFYCLEYF (SEQ ID NO: 56), PLIDQYLYYL (SEQ ID NO: 57), EERFFPSNGILIF (SEQ ID NO: 58), ADGVGSSSGNWHC (SEQ ID NO: 59), SEQ ID NOs: 383-1891 (see Table 1) - preferably group III of Table 1, more preferably group II of Table 1, especially group I of Table 1 - and SEQ ID NOs: 1892-2063 (see Table 2) - preferably group I of Table 2 -and sequences of group II or III of Table 3 (in particular SEQ ID NOs: 2064-2103), more preferably sequences of group I of Table 3,
[0098] or the group of sequences of Table 4, in particular the group of sequences identified by SEQ ID NOs: 2104-2190.

[0099] It is particularly preferred that Pₐ and/or P_{b} or, independently for each occurrence, P comprises a 6-amino-acid fragment, preferably a 7-amino-acid-fragment, more preferably a 8-amino-acid-fragment, even more preferably a 9-amino-acid fragment, yet even more preferably a 10-amino-acid fragment, especially an entire sequence selected from the group of sequences consisting of GPPTVPFLTP (SEQ ID NO: 60), ETGPPTVPFLTPP (SEQ ID NO: 61), TGPPTVPFLT (SEQ ID NO: 62), PTVPFLTPPF (SEQ ID NO: 63), HDSKLSIATQGPL (SEQ ID NO: 64), SIATQGP (SEQ ID NO: 65), NLRLGQGPLF (SEQ ID NO: 66), QGPLFINSAH (SEQ ID NO: 67), PLFINSAHNLD (SEQ ID NO: 68), LGQGPLF (SEQ ID NO: 69), LNLRLGQGPL (SEQ ID NO: 70), GQGPLFI (SEQ ID NO: 71), NLRLGQGPLFINS (SEQ ID NO: 72), LFINSAHNLDINY (SEQ ID NO: 73), FINSAHNLDI (SEQ ID NO: 74), LRLGQGPLFI (SEQ ID NO: 75), GPLFINSAHN (SEQ ID NO: 76), DEPTLLYVLFEVF (SEQ ID NO: 77), TLLYVLFEVF (SEQ ID NO: 78), DEPTLLYVLF (SEQ ID NO: 79), TLLYVLFEVFDVV (SEQ ID NO: 80), TLLYVLF (SEQ ID NO: 81), MDEPTLLYVLFEV (SEQ ID NO: 82), EPTLLYVLFE (SEQ ID NO: 83), DPMDEPTLLYVLF (SEQ ID NO: 84), LLYVLFEVFD (SEQ ID NO: 85), YVLFEVFDVV (SEQ ID NO: 86), PTLLYVLFEV (SEQ ID NO: 87), PTLLYVLFEVFDV (SEQ ID NO: 88), LYVLFEVFDV (SEQ ID NO: 89), EPTLLYVLFEVFD (SEQ ID NO: 90), LYVLFEV (SEQ ID NO: 91), PMDEPTLLYVLFE (SEQ ID NO: 92), LLYVLFE (SEQ ID NO: 93), VDPMDEPTLLYVL (SEQ ID NO: 94), YVLFEVF (SEQ ID NO: 95), PTLLYVL (SEQ ID NO: 96), MKRARPSEDTF (SEQ ID NO: 97), KRARPSEDTF (SEQ ID NO: 98), MKRARPSEDT (SEQ ID NO: 99), MKRARPSEDTFN (SEQ ID NO: 100), ARPSEDTFNP (SEQ ID NO: 101), RARPSEDTFN (SEQ ID NO: 102), RPSEDTF (SEQ ID NO: 103), MKRARPSEDTFNP (SEQ ID NO: 104), RARPSEDTFNPVY (SEQ ID NO: 105), ARPSEDT (SEQ ID NO: 106), EDTFNPVYPY (SEQ ID NO: 107), RPSEDTFNPVYPY (SEQ ID NO: 108), KRARPSEDTFNPV (SEQ ID NO: 109), DTFNPVY (SEQ ID NO: 110), RPSEDTFNPV (SEQ ID NO: 111), PSEDTFNPVY (SEQ ID NO: 112), DTFNPVYPYD (SEQ ID NO: 113), VQSAHLIIRF (SEQ ID NO: 114), AHLIIRF (SEQ ID NO: 115), SGTVQSAHLIIRF (SEQ ID NO: 116), TVQSAHLIIR (SEQ ID NO: 117), HLIIRFD (SEQ ID NO: 118), SAHLIIR (SEQ ID NO: 119), QSAHLIIRFD (SEQ ID NO: 120), ISGTVQSAHLIIR (SEQ ID NO: 121), GTVQSAHLII (SEQ ID NO: 122), GTVQSAHLIIRFD (SEQ ID NO: 123), QSAHLII (SEQ ID NO: 124), HNLDINY (SEQ ID NO: 125), LFINSAHNLDINY (SEQ ID NO: 126), NLDINYNKGLYLF (SEQ ID NO: 127), FVSPNG (SEQ ID NO: 128), NYINEIF (SEQ ID NO: 129), NKGLYLF (SEQ ID NO: 130), INYNKGLYLF (SEQ ID NO: 131), NSAHNLDINY (SEQ ID NO: 132), WDWSGHNYINEIF (SEQ ID NO: 133), SGHNYINEIF (SEQ ID NO: 134), LGTGLSF (SEQ ID NO: 135), PFLTPPF (SEQ ID NO: 136), LGQGPLF (SEQ ID NO: 137), NLRLGQGPLF (SEQ ID NO: 138), NQLNLRLGQGPLF (SEQ ID NO: 139), GQGPLFI (SEQ ID NO: 140), QLNLRLGQGPLFI (SEQ ID NO: 141), SYPFDAQNQLNLR (SEQ ID NO: 142), YPFDAQNQLNLRL (SEQ ID NO: 143), LRLGQGPLFI (SEQ ID NO: 144), NQLNLRL (SEQ ID NO: 145), FDAQNQLNLR (SEQ ID NO: 146), QNQLNLR (SEQ ID NO: 147), QGPLFIN (SEQ ID NO: 148), PFDAQNQLNLRLG (SEQ ID NO: 149), DAQNQLNLRL (SEQ ID NO: 150), RLGQGPLFIN (SEQ ID NO: 151), QLNLRLG (SEQ ID NO: 152), FDAQNQLNLRLGQ (SEQ ID NO: 153), LNLRLGQGPLFIN (SEQ ID NO: 154), AQNQLNLRLG (SEQ ID NO: 155), AQNQLNL (SEQ ID NO: 156), LNLRLGQ (SEQ ID NO: 157), SYPFDAQNQL (SEQ ID NO: 158), PFDAQNQLNL (SEQ ID NO: 159), YSMSFSW (SEQ ID NO: 160), TPSAYSMSFSWDW (SEQ ID NO: 161), MSFSWDW (SEQ ID NO: 162), PSAYSMSFSW (SEQ ID NO: 163), DTTPSAYSMSFSW (SEQ ID NO: 164), TTPSAYSMSF (SEQ ID NO: 165), YSMSFSWDWS (SEQ ID NO: 166), TGDTTPSAYSMSF (SEQ ID NO: 167), FSWDWSGHNY (SEQ ID NO: 168), SFSWDWS (SEQ ID NO: 169), SAYSMSF (SEQ ID NO: 170), SFSWDWSGHN (SEQ ID NO: 171), SAYSMSFSWD (SEQ ID NO: 172), SMSFSWD (SEQ ID NO: 173), SWDWSGHNYI (SEQ ID NO: 174), AYSMSFS (SEQ ID NO: 175), SMSFSWDWSGHNY (SEQ ID NO: 176), FSWDWSG (SEQ ID NO: 177), SWDWSGH (SEQ ID NO: 178), FLDPEYWNFR (SEQ ID NO: 179), SFLDPEYWNF (SEQ ID NO: 180), PEYWNFR (SEQ ID NO: 181), LNNSFLDPEYWNF (SEQ ID NO: 182), NNSFLDPEYWNFR (SEQ ID NO: 183), FLDPEYW (SEQ ID NO: 184), DPEYWNF (SEQ ID NO: 185), NNSFLDPEYW (SEQ ID NO: 186), VLLNNSFLDPEYW (SEQ ID NO: 187), EYWNFRN (SEQ ID NO: 188), LNNSFLDPEY (SEQ ID NO: 189), LDPEYWNFRN (SEQ ID NO: 190), LNNSFLD (SEQ ID NO: 191), NSFLDPEYWN (SEQ ID NO: 192), SSYTFSY (SEQ ID NO: 193), FATSSYTFSY (SEQ ID NO: 194), YINEIFATSSYTF (SEQ ID NO: 195), SYTFSYI (SEQ ID NO: 196), ATSSYTF (SEQ ID NO: 197), EIFATSSYTF (SEQ ID NO: 198), NEIFATSSYTFSY (SEQ ID NO: 199), ATSSYTFSYI (SEQ ID NO: 200), HNYINEIFATSSY (SEQ ID NO: 201), IFATSSY (SEQ ID NO: 202), INEIFATSSY (SEQ ID NO: 203), NYINEIFATSSYT (SEQ ID NO: 204), YINEIFA (SEQ ID NO: 205), YTFSYIA (SEQ ID NO: 206), EIFATSSYTFSYI (SEQ ID NO: 207), ALEINLEEEDDDN (SEQ ID NO: 208), ATALEINLEEEDD (SEQ ID NO: 209), EAATALEINLEEE (SEQ ID NO: 210), LEINLEE (SEQ ID NO: 211), TALEINLEEEDDD (SEQ ID NO: 212), EINLEEE (SEQ ID NO: 213), ALEINLEEED (SEQ ID NO: 214), LEINLEEEDD (SEQ ID NO: 215), TALEINLEEE (SEQ ID NO: 216), DEAATALEINLEE (SEQ ID NO: 217), LEINLEEEDDDNE (SEQ ID NO: 218), AATALEINLEEED (SEQ ID NO: 219), EINLEEEDDD (SEQ ID NO: 220), ATALEINLEE (SEQ ID NO: 221), INLEEEDDDN (SEQ ID NO: 222), NLEEEDDDNE (SEQ ID NO: 223), DEVDEQA (SEQ ID NO: 224), EDDDNEDEVDEQA (SEQ ID NO: 225), DDNEDEVDEQAEQ (SEQ ID NO: 226), EVDEQAE (SEQ ID NO: 227), DNEDEVDEQA (SEQ ID NO: 228), VDEQAEQ (SEQ ID NO: 229), EDEVDEQAEQQKT (SEQ ID NO: 230), EDEVDEQAEQ (SEQ ID NO: 231), DEVDEQAEQQKTH (SEQ ID NO: 232), NEDEVDEQAEQQK (SEQ ID NO: 233), DEVDEQAEQQ (SEQ ID NO: 234), EINLEEEDDDNED (SEQ ID NO: 235), NLEEEDDDNEDEV (SEQ ID NO: 236), INLEEED (SEQ ID NO: 237), LEEEDDDNED (SEQ ID NO: 238), INLEEEDDDNEDE (SEQ ID NO: 239), DDDNEDEVDEQAE (SEQ ID NO: 240), LEEEDDDNEDEVD (SEQ ID NO: 241), DDNEDEVDEQ (SEQ ID NO: 242), EDDDNED (SEQ ID NO: 243), NLEEEDD (SEQ ID NO: 244), DDNEDEV (SEQ ID NO: 245), DDDNEDEVDE (SEQ ID NO: 246), DDDNEDE (SEQ ID NO: 247), EEEDDDNEDE (SEQ ID NO: 248), EEDDDNE (SEQ ID NO: 249), EDDDNEDEVD (SEQ ID NO: 250), EDEVDEQ (SEQ ID NO: 251), EEDDDNEDEVDEQ (SEQ ID NO: 252), EEDDDNEDEV (SEQ ID NO: 253), EEEDDDNEDEVDE (SEQ ID NO: 254), EVDEQAEQQK (SEQ ID NO: 255), DNEDEVDEQAEQQ (SEQ ID NO: 256), VDEQAEQQKT (SEQ ID NO: 257), EVDEQAEQQKTHV (SEQ ID NO: 258), VDEQAEQQKTHVF (SEQ ID NO: 259), ALEINLE (SEQ ID NO: 260), WDEAATALEINLE (SEQ ID NO: 261), AATALEINLE (SEQ ID NO: 262), EWDEAATALEINL (SEQ ID NO: 263), EAATALEINL (SEQ ID NO: 264), LYSEDVDIET (SEQ ID NO: 265), LYSEDVDIETPDT (SEQ ID NO: 266), KVVLYSEDVDIET (SEQ ID NO: 267), IETPDTH (SEQ ID NO: 268), VDIETPDTHI (SEQ ID NO: 269), VLYSEDVDIE (SEQ ID NO: 270), DVDIETPDTHISY (SEQ ID NO: 271), VVLYSEDVDIETP (SEQ ID NO: 272), SEDVDIETPDTHI (SEQ ID NO: 273), ETPDTHI (SEQ ID NO: 274), VLYSEDVDIETPD (SEQ ID NO: 275), DVDIETPDTH (SEQ ID NO: 276), DIETPDTHIS (SEQ ID NO: 277), EDVDIETPDTHIS (SEQ ID NO: 278), IETPDTHISY (SEQ ID NO: 279), YSEDVDIETPDTH (SEQ ID NO: 280), VDIETPDTHISYM (SEQ ID NO: 281), PKVVLYSEDVDIE (SEQ ID NO: 282), DIETPDT (SEQ ID NO: 283), DIETPDTHISYMP (SEQ ID NO: 284), EDVDIETPDT (SEQ ID NO: 285), ETPDTHISYM (SEQ ID NO: 286), IETPDTHISYMP (SEQ ID NO: 287), DRMYSFFRNF (SEQ ID NO: 288), DRMYSFF (SEQ ID NO: 289), YSFFRNF (SEQ ID NO: 290), IPESYKDRMYSFF (SEQ ID NO: 291), SYKDRMYSFF (SEQ ID NO: 292), ESYKDRMYSF (SEQ ID NO: 293), KDRMYSF (SEQ ID NO: 294), YIPESYKDRMYSF (SEQ ID NO: 295), PESYKDRMYSFFR (SEQ ID NO: 296), YKDRMYSFFR (SEQ ID NO: 297), TRYFSMW (SEQ ID NO: 298), GDRTRYF (SEQ ID NO: 299), DSIGDRTRYF (SEQ ID NO: 300), DSIGDRTRYFSMW (SEQ ID NO: 301), GDRTRYFSMW (SEQ ID NO: 302), DRMYSFFRNF (SEQ ID NO: 303), SYKDRMYSFFRNF (SEQ ID NO: 304), NYNIGYQGFY (SEQ ID NO: 305), ANYNIGYQGF (SEQ ID NO: 306), MLANYNIGYQGFY (SEQ ID NO: 307), IGYQGFY (SEQ ID NO: 308), FLVQMLANYNIGY (SEQ ID NO: 309), NIGYQGF (SEQ ID NO: 310) and QMLANYNIGYQGF (SEQ ID NO: 311), optionally wherein at most three, preferably at most two, most preferably at least one amino acid is independently substituted by any other amino acid.

[0100] In another preferred embodiment, Pₐ and/or P_{b} or, independently for each occurrence, P comprises a 6-amino-acid fragment, preferably a 7-amino-acid-fragment, more preferably a 8-amino-acid-fragment, even more preferably a 9-amino-acid fragment, yet even more preferably a 10-amino-acid fragment or even a 11-amino-acid-fragment or yet even a 12-amino-acid-fragment, especially a 13-amino-acid-fragment selected from the group of sequences consisting of SEQ ID NOs: 383-1891 (see Table 1) - preferably group III of Table 1, more preferably group II of Table 1, especially group I of Table 1 - and SEQ ID NOs: 1892-2063 (see Table 2) - preferably group I of Table 2 - and sequences of group II or III of Table 3 (in particular SEQ ID NOs: 2064-2103), more preferably sequences of group I of Table 3, optionally wherein at most three, preferably at most two, most preferably at least one amino acid is independently substituted by any other amino acid.

[0101] In another preferred embodiment, Pₐ and/or P_{b} or, independently for each occurrence, P comprises a 6-amino-acid fragment, preferably a 7-amino-acid-fragment, more preferably a 8-amino-acid-fragment, even more preferably a 9-amino-acid fragment, yet even more preferably a 10-amino-acid fragment or even a 11-amino-acid-fragment or yet even a 12-amino-acid-fragment, especially a 13-amino-acid-fragment selected from the group of sequences of Table 4, in particular the group of sequences identified by SEQ ID NOs: 2104-2190, optionally wherein at most three, preferably at most two, most preferably at least one amino acid is independently substituted by any other amino acid.

[0102] It is further particularly preferred that Pₐ and/or P_{b} or, independently for each occurrence, P comprises a 6-amino-acid fragment, preferably a 7-amino-acid-fragment, more preferably a 8-amino-acid-fragment, even more preferably a 9-amino-acid fragment, yet even more preferably a 10-amino-acid fragment, especially an entire sequence selected from the group of sequences consisting of YLQGPIW (SEQ ID NO: 312), VYLQGPI (SEQ ID NO: 313), WQNRDVY (SEQ ID NO: 314), DVYLQGP (SEQ ID NO: 315), QNRDVYL (SEQ ID NO: 316), LQGPIWA (SEQ ID NO: 317), RDVYLQG (SEQ ID NO: 318), NRDVYLQ (SEQ ID NO: 319), YFGYSTPWGYFDF (SEQ ID NO: 320), FGYSTPWGYF (SEQ ID NO: 321), GYSTPWGYFD (SEQ ID NO: 322), YSTPWGYFDF (SEQ ID NO: 323), NTYFGYSTPWGYF (SEQ ID NO: 324), TPWGYFDFNRFHC (SEQ ID NO: 325), TYFGYSTPWGYFD (SEQ ID NO: 326), DNTYFGYSTPWGY (SEQ ID NO: 327), YFGYSTPWGY (SEQ ID NO: 328), FGYSTPWGYFDFN (SEQ ID NO: 329), NWLPGPC (SEQ ID NO: 330), WLPGPCY (SEQ ID NO: 331), QAKNWLPGPC (SEQ ID NO: 332), AKNWLPGPCY (SEQ ID NO: 333), MANQAKNWLPGPC (SEQ ID NO: 334), QGCLPPF (SEQ ID NO: 335), GCLPPFP (SEQ ID NO: 336), VLGSAHQGCLPPF (SEQ ID NO: 337), LPYVLGSAHQGCL (SEQ ID NO: 338), YVLGSAHQGC (SEQ ID NO: 339), CLPPFPA (SEQ ID NO: 340), SAHQGCLPPF (SEQ ID NO: 341), VLGSAHQGCL (SEQ ID NO: 342), PYVLGSAHQGCLP (SEQ ID NO: 343), GRSSFYC (SEQ ID NO: 344), AVGRSSFYCLEYF (SEQ ID NO: 345), AVGRSSFYCL (SEQ ID NO: 346), QAVGRSSFYCLEY (SEQ ID NO: 347), NGSQAVGRSSFYC (SEQ ID NO: 348), DQYLYYL (SEQ ID NO: 349), PLIDQYLYYL (SEQ ID NO: 350), IDQYLYY (SEQ ID NO: 351), FFPSNGILIF (SEQ ID NO: 352), EERFFPSNGILIF (SEQ ID NO: 353), VGSSSGNWHC (SEQ ID NO: 354) and ADGVGSSSGNWHC (SEQ ID NO: 355), optionally wherein at most three, preferably at most two, most preferably at least one amino acid is independently substituted by any other amino acid.

[0103] According to a further preference, Pₐ and/or P_{b} or, independently for each occurrence, P consists of a 6-amino-acid fragment, preferably a 7-amino-acid-fragment, more preferably a 8-amino-acid-fragment, even more preferably a 9-amino-acid fragment, yet even more preferably a 10-amino-acid fragment, especially an entire sequence selected from the group of sequences set forth in either of the four paragraphs right above, optionally wherein at most three, preferably at most two, most preferably at least one amino acid is independently substituted by any other amino acid, optionally with an N-terminal and/or C-terminal cysteine residue.

[0104] In the entire context of the present invention, if a peptide, e.g. Pₐ and/or P_{b} or (independently for each occurrence) peptide P, contains a fragment of at least 4 consecutive amino acids selected from a sequence listed in a row of any one of Tables 1-4 (see below in the Examples section), it is preferred that this fragment is extended (N-terminally or C-terminally) such that the peptide actually contains a longer fragment (e.g. at least 6 or at least 7 or at least 8 or at least 9 or at least 10 or at least 11 or at least 12 or 13 amino acids long) of the source protein given in the same row of the table. In other words, it is preferred that the peptide contains a portion of at least 5 or at least 6 or at least 7 or at least 8 or at least 9 or at least 10 or at least 11 or at least 12 or 13 consecutive amino acids of the viral source protein of the fragment sequence (as given in Tables 1-4).

[0105] It is highly preferred that the peptides used for the inventive compound do not bind to any HLA Class I or HLA Class II molecule (i.e. of the individual to be treated, e.g. human), in order to prevent presentation and stimulation via a T-cell receptor in vivo and thereby induce an immune reaction. It is generally not desired to involve any suppressive (or stimulatory) T-cell reaction in contrast to antigen-specific immunologic tolerization approaches. Therefore, to avoid T-cell epitope activity as much as possible, the peptides of the compound of the present invention (e.g. peptide P or Pₐ or P_{b}) preferably fulfil one or more of the following characteristics:
[0106] To reduce the probability for a peptide used in the compound of the present invention to bind to an HLA Class II or Class I molecule, the peptide (e.g. peptide P or Pₐ or P_{b})has a preferred length of 4-8 amino acids, although somewhat shorter or longer lengths are still acceptable.
[0107] To further reduce the probability that such a peptide binds to an HLA Class II or Class I molecule, it is preferred to test the candidate peptide sequence by HLA binding prediction algorithms such as NetMHCII-2.3 (reviewed by Jensen et al 2018). Preferably, a peptide (e.g. peptide P or Pₐ or P_{b})used in the compound of the present invention has (predicted) HLA binding (IC50) of at least 500 nM. More preferably, HLA binding (IC50) is more than 1000 nM, especially more than 2000 nM (cf. e.g. Peters et al 2006). In order to decrease the likelihood of HLA Class I binding, NetMHCpan 4.0 may also be applied for prediction (Jurtz et al 2017).
[0108] To further reduce the probability that such a peptide binds to an HLA Class I molecule, the NetMHCpan Rank percentile threshhold can be set to a background level of 10% according to Koşaloğlu-Yalçιn et al, 2018. Preferably, a peptide (e.g. peptide P or Pₐ or P_{b})used in the compound of the present invention therefore has a %Rank value of more than 3, preferably more than 5, more preferably more than 10 according to the NetMHCpan algorithm.
[0109] To further reduce the probability that such a peptide binds to an HLA Class II molecule, it is beneficial to perform in vitro HLA-binding assays commonly used in the art such as for example refolding assays, iTopia, peptide rescuing assays or array-based peptide binding assays. Alternatively, or in addition thereto, LC-MS based analytics can be used, as e.g. reviewed by Gfeller et al 2016.

[0110] For stronger reduction of the titre of the undesired antibodies, it is preferred that the peptides used in the present invention are circularized (see also Example 4). Accordingly, in a preferred embodiment, at least one occurrence of P is a circularized peptide. Preferably at least 10% of all occurrences of P are circularized peptides, more preferably at least 25% of all occurrences of P are circularized peptides, yet more preferably at least 50% of all occurrences of P are circularized peptides, even more preferably at least 75% of all occurrences of P are circularized peptides, yet even more preferably at least 90% of all occurrences of P are circularized peptides or even at least 95% of all occurrences of P are circularized peptides, especially all of the occurrences of P are circularized peptides. Several common techniques are available for circularization of peptides, see e.g. Ong et al 2017. It goes without saying that “circularized peptide” as used herein shall be understood as the peptide itself being circularized, as e.g. disclosed in Ong et al. (and not e.g. grafted on a circular scaffold with a sequence length that is longer than 13 amino acids). Such peptides may also be referred to as cyclopeptides herein.

[0111] Further, for stronger reduction of the titre of the undesired antibodies relative to the amount of scaffold used, in a preferred embodiment of the compound of the present invention, independently for each of the peptide n-mers, n is at least 2, more preferably at least 3, especially at least 4. Usually, in order to avoid complexities in the manufacturing process, independently for each of the peptide n-mers, n is less than 10, preferably less than 9, more preferably less than 8, even more preferably less than 7, yet even more preferably less than 6, especially less than 5. To benefit from higher avidity through divalent binding of the undesired antibody, it is highly preferred that, for each of the peptide n-mers, n is 2.

[0112] For multivalent binding of the undesired antibodies, it is advantageous that the peptide dimers or n-mers are spaced by a hydrophilic, structurally flexible, immunologically inert, non-toxic and clinically approved spacer such as (hetero-)bifunctional and -trifunctional Polyethylene glycol (PEG) spacers (e.g. NHS-PEG-Maleimide) - a wide range of PEG chains is available and PEG is approved by the FDA. Alternatives to PEG linkers such as immunologically inert and non-toxic synthetic polymers or glycans are also suitable. Accordingly, in the context of the present invention, the spacer (e.g. spacer S) is preferably selected from PEG molecules or glycans. For instance, the spacer such as PEG can be introduced during peptide synthesis. Such spacers (e.g. PEG spacers) may have a molecular weight of e.g. 10000 Dalton. Evidently, within the context of the present invention, the covalent binding of the peptide n-mers to the biopolymer scaffold via a linker each may for example also be achieved by binding of the linker directly to a spacer of the peptide n-mer (instead of, e.g., to a peptide of the peptide n-mer).

[0113] Preferably, each of the peptide n-mers is covalently bound to the biopolymer scaffold, preferably via a linker each.

[0114] As used herein, the linker may e.g. be selected from disulphide bridges and PEG molecules.

[0115] According to a further preferred embodiment of the inventive compound, independently for each occurrence, P is Pₐ or P_{b}.

[0116] Furthermore, it is preferred when in the first peptide n-mer, each occurrence of P is Pₐ and, in the second peptide n-mer, each occurrence of P is P_{b}. Alternatively, or in addition thereto, Pₐ and/or P_{b} is circularized.

[0117] Divalent binding is particularly suitable to reduce antibody titres. According, in a preferred embodiment,
[0118] the first peptide n-mer is Pₐ - S - Pₐ and the second peptide n-mer is Pₐ - S - Pₐ ;
[0119] the first peptide n-mer is Pₐ - S - Pₐ and the second peptide n-mer is P_{b} - S - P_{b} ;
[0120] the first peptide n-mer is P_{b} - S - P_{b} and the second peptide n-mer is P_{b} - S - P_{b};
[0121] the first peptide n-mer is Pₐ - S - P_{b} and the second peptide n-mer is Pₐ - S - P_{b};
[0122] the first peptide n-mer is Pₐ - S - P_{b} and the second peptide n-mer is Pₐ - S - Pₐ; or
[0123] the first peptide n-mer is Pₐ - S - P_{b} and the second peptide n-mer is P_{b} - S - P_{b}.

[0124] For increasing effectivity, in a preferred embodiment the first peptide n-mer is different from the second peptide n-mer. For similar reasons, preferably, the peptide Pₐ is different from the peptide P_{b}, preferably wherein the peptide Pₐ and the peptide P_{b} are two different epitopes of the same antigen or two different epitope parts of the same epitope.

[0125] Especially for better targeting of polyclonal antibodies, it is advantageous when the peptide Pₐ and the peptide P_{b} comprise the same amino-acid sequence fragment, wherein the amino-acid sequence fragment has a length of at least 2 amino acids, preferably at least 3 amino acids, more preferably at least 4 amino acids, yet more preferably at least 5 amino acids, even more preferably at least 6 amino acids, yet even more preferably at least 7 amino acids, especially at least 8 amino acids or even at least 9 amino acids.

[0126] Further, for stronger reduction of the titre of the undesired antibodies relative to the amount of scaffold used, the compound comprises a plurality of said first peptide n-mer (e.g. up to 10 or 20 or 30) and/or a plurality of said second peptide n-mer (e.g. up to 10 or 20 or 30).

[0127] As also illustrated above, it is highly preferred when the compound of the present invention is non-immunogenic in a mammal, preferably in a human, in a non-human primate, in a sheep, in a pig, in a dog or in a rodent.

[0128] In the context of the present invention, a non-immunogenic compound preferably is a compound wherein the biopolymer scaffold (if it is a protein) and/or the peptides (of the peptide n-mers) have an IC50 higher than 100 nM, preferably higher than 500 nM, even more preferably higher than 1000 nM, especially higher than 2000 nM, against HLA-DRB1_0101 as predicted by the NetMHCII-2.3 algorithm. The NetMHCII-2.3 algorithm is described in detail in Jensen et al, which is incorporated herein by reference. The algorithm is publicly available under http://www.cbs.dtu.dk/services/NetMHCII-2.3/. Even more preferably, a non-immunogenic compound (or pharmaceutical composition) does not bind to any HLA and/or MHC molecule (e.g. in a mammal, preferably in a human, in a non-human primate, in a sheep, in a pig, in a dog or in a rodent; or of the individual to be treated) in vivo.

[0129] According to a further preference, the compound is for intracorporeal sequestration (or intracorporeal depletion) of at least one antibody (against the viral vector or neutralizing the viral vector) in an individual, preferably in the bloodstream of the individual and/or for reduction of the titre of at least one antibody (against the viral vector or neutralizing the viral vector) in the individual, preferably in the bloodstream of the individual.

[0130] In another preferred embodiment, the entire sequence, optionally with the exception of an N-terminal and/or C-terminal cysteine, of at least one occurrence of P, preferably of at least 10% of all occurrences of P, more preferably of at least 25% of all occurrences of P, yet more preferably of at least 50% of all occurrences of P, even more preferably of at least 75% of all occurrences of P, yet even more preferably of at least 90% of all occurrences of P or even of at least 95% of all occurrences of P, especially of all of the occurrences of P, is identical to a sequence fragment of a protein, wherein the protein is identified by one of the UniProt accession codes disclosed herein; optionally wherein the sequence fragment comprises at most five, preferably at most four, more preferably at most three, even more preferably at most two, especially at most one amino acid substitutions (e.g. for the purposes mentioned above, such as creating mimotopes).

[0131] In another preferred embodiment, the entire sequence, optionally with the exception of an N-terminal and/or C-terminal cysteine, of peptide Pₐ is identical to a sequence fragment of a protein, wherein the protein is identified by one of the UniProt accession codes disclosed herein; optionally wherein said sequence fragment comprises at most five, preferably at most four, more preferably at most three, even more preferably at most two, especially at most one amino acid substitutions (e.g. for the purposes mentioned above, such as creating mimotopes).

[0132] In another preferred embodiment, the entire sequence, optionally with the exception of an N-terminal and/or C-terminal cysteine, of peptide P_{b} is identical to a sequence fragment of a protein, wherein the protein is identified by one of the UniProt accession codes disclosed herein; optionally wherein said sequence fragment comprises at most five, preferably at most four, more preferably at most three, even more preferably at most two, especially at most one amino acid substitutions (e.g. for the purposes mentioned above, such as creating mimotopes).

[0133] In another preferred embodiment, the entire sequence, optionally with the exception of an N-terminal and/or C-terminal cysteine, of peptide Pₐ is identical to a sequence fragment of a protein and the entire sequence, optionally with the exception of an N-terminal and/or C-terminal cysteine, of peptide P_{b} is identical to the same or another, preferably another, sequence fragment of the same protein, wherein the protein is identified by one of the UniProt accession codes listed herein; optionally wherein said sequence fragment and/or said another sequence fragment comprises at most five, preferably at most four, more preferably at most three, even more preferably at most two, especially at most one amino acid substitutions (e.g. for the purposes mentioned above, such as creating mimotopes).

[0134] In an aspect, the present invention relates to a pharmaceutical composition comprising the inventive and at least one pharmaceutically acceptable excipient.

[0135] In embodiments, the composition is prepared for intraperitoneal, subcutaneous, intramuscular and/or intravenous administration. In particular, the composition is for repeated administration (since it is typically non-immunogenic).

[0136] In a preference, the molar ratio of peptide P or Pₐ or P_{b} to biopolymer scaffold in the composition is from 2:1 to 100:1, preferably from 3:1 to 90:1, more preferably from 4:1 to 80:1, even more preferably from 5:1 to 70:1, yet even more preferably from 6:1 to 60:1, especially from 7:1 to 50:1 or even from 8:10 to 40:1.

[0137] In another aspect, the compound of the present invention is for use in therapy.

[0138] In the course of the present invention, it turned out that the in vivo kinetics of undesirable-antibody lowering by the inventive compound is typically very fast, sometimes followed by a mild rebound of the undesirable antibody. It is thus particularly preferred when the compound (or the pharmaceutical composition comprising the compound) is administered at least twice within a 96-hour window, preferably within a 72-hour window, more preferably within a 48-hour window, even more preferably within a 36-hour window, yet even more preferably within a 24-hour window, especially within a 18-hour window or even within a 12-hour window; in particular wherein this window is followed by administration of the vaccine or gene therapy composition as described herein within 24 hours, preferably within 12 hours (but typically after at least 6 hours). For instance, the pharmaceutical composition may be administered at -24 hrs and -12 hrs before administration of the vaccine or gene therapy composition replacement product at 0 hrs.

[0139] According to a particular preference, the compound of the present invention is for use in increasing efficacy of a vaccine in an individual, wherein the vaccine comprises the viral vector as defined herein, preferably wherein the pharmaceutical composition is administered to the individual prior to or concurrently with administration of the vaccine.

[0140] According to a further particular preference, the compound of the present invention is for use in increasing efficacy of a gene therapy composition in an individual, wherein the gene therapy composition comprises the viral vector as defined herein, preferably wherein the pharmaceutical composition is administered to the individual prior to or concurrently with administration of the gene therapy composition.

[0141] In embodiments, one or more antibodies are present in the individual which are specific for at least one occurrence of peptide P, or for peptide Pₐ and/or peptide P_{b}, preferably wherein said antibodies are neutralizing antibodies for said viral vector.

[0142] It is highly preferred that the composition is non-immunogenic in the individual (e.g. it does not comprise an adjuvant or an immunostimulatory substance that stimulates the innate or the adaptive immune system, e.g. such as an adjuvant or a T-cell epitope).

[0143] The composition of the present invention may be administered at a dose of 1-1000 mg, preferably 2-500 mg, more preferably 3-250 mg, even more preferably 4-100 mg, especially 5-50 mg, compound per kg body weight of the individual, preferably wherein the composition is administered repeatedly. Such administration may be intraperitoneally, subcutaneously, intramuscularly or intravenously.

[0144] In an aspect, the present invention relates to a method of sequestering (or depleting) one or more antibodies (preferably wherein said antibodies are neutralizing antibodies for said viral vector) present in an individual, comprising
[0145] obtaining a pharmaceutical composition as defined herein, wherein the composition is non-immunogenic in the individual and wherein the one or more antibodies present in the individual are specific for at least one occurrence of P, or for peptide Pₐ and/or peptide P_{b}; and
[0146] administering (in particular repeatedly administering, e.g. at least two times, preferably at least three times, more preferably at least five times) the pharmaceutical composition to the individual.

[0147] In the context of the present invention, the individual (to be treated) may be a non-human animal, preferably a non-human primate, a sheep, a pig, a dog or a rodent, in particular a mouse.

[0148] Preferably, the biopolymer scaffold is autologous with respect to the individual, preferably wherein the biopolymer scaffold is an autologous protein (i.e. murine albumin is used when the individual is a mouse).

[0149] In embodiments, the individual is healthy.

[0150] In yet another aspect, the present invention relates to a pharmaceutical composition (i.e. a vaccine or gene therapy composition), comprising the compound defined herein and further comprising the viral vector and optionally at least one pharmaceutically acceptable excipient. The viral vector typically comprises a peptide fragment with a sequence length of at least six, preferably at least seven, more preferably at least eight, especially at least 9 amino acids. The sequence of at least one occurrence of peptide P, or peptide Pₐ and/or peptide P_{b}, of the compound is at least 70% identical, preferably at least 75% identical, more preferably at least 80% identical, yet more preferably at least 85% identical, even more preferably at least 90% identical, yet even more preferably at least 95% identical, especially completely identical to the sequence of said peptide fragment. Preferably, this pharmaceutical composition is for use in vaccination or gene therapy and/or for use in prevention or inhibition of an undesirable immune reaction against the viral vector.

[0151] This composition is furthermore preferably non-immunogenic in the individual.

[0152] In even yet another aspect, the present invention provides a method of inhibiting a (undesirable) - especially humoral -immune reaction to a treatment with a vaccine or gene therapy composition in an individual in need of treatment with the vaccine or gene therapy composition as defined above or of inhibiting neutralization of a viral vector in a vaccine or gene therapy composition as defined above for an individual in need of treatment with the vaccine or gene therapy composition, comprising obtaining said vaccine or gene therapy composition ; wherein the compound of the vaccine or gene therapy composition is non-immunogenic in the individual, and administering (preferably repeatedly administering) the vaccine or gene therapy composition to the individual.

[0153] In general, screening for peptide mimotopes per se is known in the art, see for instance Shanmugam et al. Mimotope-based compounds of the invention have the following two advantages over compounds based on wild-type epitopes: First, the undesired antibodies, as a rule, have even higher affinities for mimotopes found by screening a peptide library, leading to higher clearance efficiency of the mimotope-based compound. Second, mimotopes further enable avoiding T-cell epitope activity as much as possible (as described hereinabove) in case the wild-type epitope sequence induces such T-cell epitope activity.

[0154] In a further aspect, the present invention relates to a peptide, wherein the peptide is defined as disclosed herein for any one of the at least two peptides of the inventive compound, P, Pₐ, or P_{b}.

[0155] In certain embodiments, such peptides may be used as probes for the diagnostic typing and analysis of circulating viral vector-neutralizing antibodies. The peptides can e.g. be used as part of a diagnostic vector-neutralizing antibody typing or screening device or kit or procedure, as a companion diagnostic, for patient stratification or for monitoring vector-neutralizing antibody levels prior to, during and/or after vaccination or gene therapy.

[0156] In a further aspect, the invention relates to a method for detecting and/or quantifying antibodies in a biological sample comprising the steps of
[0157] bringing the sample into contact with the peptide defined as disclosed herein (e.g. for P, Pₐ, or P_{b}), and
[0158] detecting the presence and/or concentration of antibodies in the sample.

[0159] The skilled person is familiar with methods for detecting and/or quantifying antibodies in biological samples. The method can e.g. be a sandwich assay, preferably an enzyme-linked immunosorbent assay (ELISA), or a surface plasmon resonance (SPR) assay.

[0160] In a preference, the peptide (especially at least 10, more preferably at least 100, even more preferably at least 1000, especially at least 10000 different peptides of the invention) is immobilized on a solid support, preferably an ELISA plate or an SPR chip or a biosensor-based diagnostic device with an electrochemical, fluorescent, magnetic, electronic, gravimetric or optical biotransducer. Alternatively, or in addition thereto, the peptide (especially at least 10, more preferably at least 100, even more preferably at least 1000, especially at least 10000 different peptides of the invention) may be coupled to a reporter or reporter fragment, such as a reporter fragment suitable for a protein-fragment complementation assay (PCA); see e.g. Li et al, 2019, or Kainulainen et al, 2021.

[0161] Preferably, the sample is obtained from a mammal, preferably a human. Preferably the sample is a blood sample, preferably a whole blood, serum, or plasma sample.

[0162] The invention further relates to the use of a peptide defined as disclosed herein (e.g. for P, Pₐ, or P_{b})in a diagnostic assay, preferably ELISA, preferably as disclosed herein above.

[0163] A further aspect of the invention relates to a diagnostic device comprising the peptide defined as disclosed herein (e.g. for P, Pₐ, or P_{b}), preferably immobilized on a solid support. In a preference, the solid support is an ELISA plate or a surface plasmon resonance chip. In another preference, the diagnostic device is a biosensor-based diagnostic device with an electrochemical, fluorescent, magnetic, electronic, gravimetric or optical biotransducer.

[0164] In another preferred embodiment, the diagnostic device is a lateral flow assay.

[0165] The invention further relates to a diagnostic kit comprising a peptide defined as disclosed herein (e.g. for P, Pₐ, or P_{b}), preferably a diagnostic device as defined herein. Preferably the diagnostic kit further comprises one or more selected from the group of a buffer, a reagent, instructions. Preferably the diagnostic kit is an ELISA kit.

[0166] A further aspect relates to an apheresis device comprising the peptide defined as disclosed herein (e.g. for P, Pₐ, or P_{b}). Preferably the peptide is immobilized on a solid carrier. It is especially preferred if the apheresis device comprises at least two, preferably at least three, more preferably at least four different peptides defined as disclosed herein (e.g. for P, Pₐ, or P_{b}). In a preferred embodiment the solid carrier comprises the inventive compound.

[0167] Preferably, the solid carrier is capable of being contacted with blood or plasma flow. Preferably, the solid carrier is a sterile and pyrogen-free column.

[0168] In the context of the present invention, for improved bioavailability, it is preferred that the inventive compound has a solubility in water at 25° C. of at least 0.1 µg/ml, preferably at least 1 µg/ml, more preferably at least 10 µg/ml, even more preferably at least 100 µg/ml, especially at least 1000 µg/ml.

[0169] The term “preventing” or “prevention” as used herein means to stop a disease state or condition from occurring in a patient or subject completely or almost completely or at least to a (preferably significant) extent, especially when the patient or subject or individual is predisposed to such a risk of contracting a disease state or condition.

[0170] The pharmaceutical composition of the present invention is preferably provided as a (typically aqueous) solution, (typically aqueous) suspension or (typically aqueous) emulsion. Excipients suitable for the pharmaceutical composition of the present invention are known to the person skilled in the art, upon having read the present specification, for example water (especially water for injection), saline, Ringer’s solution, dextrose solution, buffers, Hank solution, vesicle forming compounds (e.g. lipids), fixed oils, ethyl oleate, 5% dextrose in saline, substances that enhance isotonicity and chemical stability, buffers and preservatives. Other suitable excipients include any compound that does not itself induce the production of antibodies in the patient (or individual) that are harmful for the patient (or individual). Examples are well tolerable proteins, polysaccharides, polylactic acids, polyglycolic acid, polymeric amino acids and amino acid copolymers. This pharmaceutical composition can (as a drug) be administered via appropriate procedures known to the skilled person (upon having read the present specification) to a patient or individual in need thereof (i.e. a patient or individual having or having the risk of developing the diseases or conditions mentioned herein). The preferred route of administration of said pharmaceutical composition is parenteral administration, in particular through intraperitoneal, subcutaneous, intramuscular and/or intravenous administration. For parenteral administration, the pharmaceutical composition of the present invention is preferably provided in injectable dosage unit form, e.g. as a solution (typically as an aqueous solution), suspension or emulsion, formulated in conjunction with the above-defined pharmaceutically acceptable excipients. The dosage and method of administration, however, depends on the individual patient or individual to be treated. Said pharmaceutical composition can be administered in any suitable dosage known from other biological dosage regimens or specifically evaluated and optimised for a given individual. For example, the active agent may be present in the pharmaceutical composition in an amount from 1 mg to 10 g, preferably 50 mg to 2 g, in particular 100 mg to 1 g. Usual dosages can also be determined on the basis of kg body weight of the patient, for example preferred dosages are in the range of 0.1 mg to 100 mg/kg body weight, especially 1 to 10 mg/kg body weight (per administration session). The administration may occur e.g. once daily, once every other day, once per week or once every two weeks. As the preferred mode of administration of the inventive pharmaceutical composition is parenteral administration, the pharmaceutical composition according to the present invention is preferably liquid or ready to be dissolved in liquid such sterile, de-ionised or distilled water or sterile isotonic phosphate-buffered saline (PBS). Preferably, 1000 µg (dry-weight) of such a composition comprises or consists of 0.1-990 µg, preferably 1-900 µg, more preferably 10- 200 µg compound, and option-ally 1-500 µg, preferably 1-100 µg, more preferably 5-15 µg (buffer) salts (preferably to yield an isotonic buffer in the final volume), and optionally 0.1-999.9 µg, preferably 100-999.9 µg, more preferably 200-999 µg other excipients. Preferably, 100 mg of such a dry composition is dissolved in sterile, de-ionised/distilled water or sterile isotonic phosphate-buffered saline (PBS) to yield a final volume of 0.1-100 ml, preferably 0.5-20 ml, more preferably 1-10 ml.

[0171] It is evident to the skilled person that active agents and drugs described herein can also be administered in salt-form (i.e. as a pharmaceutically acceptable salt of the active agent). Accordingly, any mention of an active agent herein shall also include any pharmaceutically acceptable salt forms thereof.

[0172] Methods for chemical synthesis of peptides used for the compound of the present invention are well-known in the art. Of course, it is also possible to produce the peptides using recombinant methods. The peptides can be produced in microorganisms such as bacteria, yeast or fungi, in eukaryotic cells such as mammalian or insect cells, or in a recombinant virus vector such as adenovirus, poxvirus, herpesvirus, Simliki forest virus, baculovirus, bacteriophage, sindbis virus or sendai virus. Suitable bacteria for producing the peptides include E. coli, B. subtilis or any other bacterium that is capable of expressing such peptides. Suitable yeast cells for expressing the peptides of the present invention include Saccharomyces cerevisiae, Schizosaccharomyces pombe, Candida, Pichiapastoris or any other yeast capable of expressing peptides. Corresponding means and methods are well known in the art. Also, methods for isolating and purifying recombinantly produced peptides are well known in the art and include e.g. gel filtration, affinity chromatography, ion exchange chromatography etc.

[0173] Beneficially, cysteine residues are added to the peptides at the N- and/or C-terminus to facilitate coupling to the biopolymer scaffold, especially.

[0174] To facilitate isolation of said peptides, fusion polypeptides may be made wherein the peptides are translationally fused (covalently linked) to a heterologous polypeptide which enables isolation by affinity chromatography. Typical heterologous polypeptides are His-Tag (e.g. His6; 6 histidine residues), GST-Tag (Glutathione-S-transferase) etc. The fusion polypeptide facilitates not only the purification of the peptides but can also prevent the degradation of the peptides during the purification steps. If it is desired to remove the heterologous polypeptide after purification, the fusion polypeptide may comprise a cleavage site at the junction between the peptide and the heterologous polypeptide. The cleavage site may consist of an amino acid sequence that is cleaved with an enzyme specific for the amino acid sequence at the site (e.g. proteases).

[0175] The coupling/conjugation chemistry used to link the peptides / peptide n-mers to the biopolymer scaffold (e.g. via heterobifunctional compounds such as GMBS and of course also others as described in “Bioconjugate Techniques”, Greg T. Hermanson) or used to conjugate the spacer to the peptides in the context of the present invention can also be selected from reactions known to the skilled in the art. The biopolymer scaffold itself may be recombinantly produced or obtained from natural sources.

[0176] Herein, the term “specific for” - as in “molecule A specific for molecule B″ - means that molecule A has a binding preference for molecule B compared to other molecules in an individual’s body. Typically, this entails that molecule A (such as an antibody) has a dissociation constant (also called “affinity”) in regard to molecule B (such as the antigen, specifically the binding epitope thereof) that is lower than (i.e. “stronger than”) 1000 nM, preferably lower than 100 nM, more preferably lower than 50 nM, even more preferably lower than 10 nM, especially lower than 5 nM.

[0177] Herein, “UniProt” refers to the Universal Protein Resource. UniProt is a comprehensive resource for protein sequence and annotation data. UniProt is a collaboration between the European Bioinformatics Institute (EMBL-EBI), the SIB Swiss Institute of Bioinformatics and the Protein Information Resource (PIR). Across the three institutes more than 100 people are involved through different tasks such as database curation, software development and support. Website: http://www.uniprot.org/

[0178] Entries in the UniProt databases are identified by their accession codes (referred to herein e.g. as “UniProt accession code” or briefly as “UniProt” followed by the accession code), usually a code of six alphanumeric letters (e.g. “Q1HVF7”). If not specified otherwise, the accession codes used herein refer to entries in the Protein Knowledgebase (UniProtKB) of UniProt. If not stated otherwise, the UniProt database state for all entries referenced herein is of 23 Sep. 2020 (UniProt/UniProtKB Release 2020_04).

[0179] In the context of the present application, sequence variants (designated as “natural variant” in UniProt) are expressly included when referring to a UniProt database entry.

[0180] “Percent (%) amino acid sequence identity” or “X% identical” (such as “70% identical”) with respect to a reference polypeptide or protein sequence is defined as the percentage of amino acid residues in a candidate sequence that are identical with the amino acid residues in the reference polypeptide sequence, after aligning the sequences and introducing gaps, if necessary, to achieve the maximum percent sequence identity, and not considering any conservative substitutions as part of the sequence identity. Alignment for purposes of determining percent amino acid sequence identity can be achieved in various ways that are within the skill in the art, for instance, using publicly available computer software such as BLAST, BLAST-2, ALIGN, ALIGN-2, Megalign (DNASTAR) or the “needle” pairwise sequence alignment application of the EMBOSS software package. Those skilled in the art can determine appropriate parameters for aligning sequences, including any algorithms needed to achieve maximal alignment over the full length of the sequences being compared. For purposes herein, however, % amino acid sequence identity values are calculated using the sequence alignment of the computer programme “needle” of the EMBOSS software package (publicly available from European Molecular Biology Laboratory; Rice et al., 2000).

[0181] The needle programme can be accessed under the web site http://www.ebi.ac.uk/Tools/psa/emboss_needle/ or downloaded for local installation as part of the EMBOSS package from http://emboss.sourceforge.net/. It runs on many widely-used UNIX operating systems, such as Linux.

[0182] To align two protein sequences, the needle programme is preferably run with the following parameters:

Commandline: needle -auto -stdout -asequence
SEQUENCE_FILE_A -bsequence SEQUENCE_FILE_B -datafile EBLOSUM62 -
gapopen 10.0 -gapextend 0.5 -endopen 10.0 -endextend 0.5 -
aformat3 pair -sprotein1 -sprotein2 (Align_format: pair
Report_file: stdout)

[0183] The % amino acid sequence identity of a given amino acid sequence A to, with, or against a given amino acid sequence B (which can alternatively be phrased as a given amino acid sequence A that has or comprises a certain % amino acid sequence identity to, with, or against a given amino acid sequence B) is calculated as follows:

$$\text{100 times the fraction} \text{X} / \text{Y}$$

where X is the number of amino acid residues scored as identical matches by the sequence alignment program needle in that program’s alignment of A and B, and where Y is the total number of amino acid residues in B. It will be appreciated that where the length of amino acid sequence A is not equal to the length of amino acid sequence B, the % amino acid sequence identity of A to B will not equal the % amino acid sequence identity of B to A. In cases where “the sequence of A is more than N% identical to the entire sequence of B”, Y is the entire sequence length of B (i.e. the entire number of amino acid residues in B). Unless specifically stated otherwise, all % amino acid sequence identity values used herein are obtained as described in the immediately preceding paragraph using the needle computer program.

[0184] The present invention further relates to the following embodiments:

[0185] Embodiment 1. A compound comprising
[0186] a biopolymer scaffold and at least
[0187] a first peptide n-mer of the general formula:
$$\text{P} {\left(- \text{S} - \text{P}\right)}_{\left(\text{n-1}\right)} \text{and}$$
a second peptide n-mer of the general formula:
$$\text{P} {\left(- \text{S} - \text{P}\right)}_{\left(\text{n-1}\right)} \text{;}$$

[0188] wherein, independently for each occurrence, P is a peptide with a sequence length of 6-13 amino acids, and S is a non-peptide spacer,
[0189] wherein, independently for each of the peptide n-mers, n is an integer of at least 1, preferably of at least 2, more preferably of at least 3, especially of at least 4,
[0190] wherein each of the peptide n-mers is bound to the biopolymer scaffold, preferably via a linker each,
[0191] wherein, independently for each occurrence, P has an amino-acid sequence comprising a sequence fragment with a length of at least six (preferably at least 7, more preferably at least 8, especially at least 9) amino acids of a capsid protein sequence of a viral vector, in particular of an AdV hexon protein sequence, an AdV fiber protein sequence, an AdV penton protein sequence, an AdV IIIa protein sequence, an AdV VI protein sequence, an AdV VIII protein sequence or an AdV IX protein sequence or of any one of the capsid protein sequences identified in FIG. 10 and FIG. 11 or of any one of the capsid protein sequences listed in Cearley et al., 2008,
[0192] optionally wherein at most three, preferably at most two, most preferably at least one amino acid of the sequence fragment is independently substituted by any other amino acid.

[0193] Embodiment 2. The compound of embodiment 1, wherein at least one occurrence of P is a circularized peptide, preferably wherein at least 10% of all occurrences of P are circularized peptides, more preferably wherein at least 25% of all occurrences of P are circularized peptides, yet more preferably wherein at least 50% of all occurrences of P are circularized peptides, even more preferably wherein at least 75% of all occurrences of P are circularized peptides, yet even more preferably wherein at least 90% of all occurrences of P are circularized peptides or even wherein at least 95% of all occurrences of P are circularized peptides, especially wherein all of the occurrences of P are circularized peptides.

[0194] Embodiment 3. The compound of embodiment 1 or 2, wherein, independently for each of the peptide n-mers, n is at least 2, more preferably at least 3, especially at least 4.

[0195] Embodiment 4. The compound of any one of embodiments 1 to 3, wherein, independently for each of the peptide n-mers, n is less than 10, preferably less than 9, more preferably less than 8, even more preferably less than 7, yet even more preferably less than 6, especially less than 5.

[0196] Embodiment 5. The compound of any one of embodiments 1 to 4, wherein, for each of the peptide n-mers, n is 2.

[0197] Embodiment 6. The compound of any one of embodiments 1 to 5, wherein at least one occurrence of P is Pₐ and/or at least one occurrence of P is P_{b},

[0198] wherein Pₐ is a peptide with a sequence length of 6-13 amino acids, preferably 7-11 amino acids, more preferably 7-9 amino acids,

[0199] wherein P_{b} is a peptide with a sequence length of 6-13 amino acids, preferably 7-11 amino acids, more preferably 7-9 amino acids.

[0200] Embodiment 7. The compound of any one of embodiments 1 to 6, wherein, independently for each occurrence, P is Pₐ or P_{b}.

[0201] Embodiment 8. The compound of any one of embodiments 1 to 7, wherein, in the first peptide n-mer, each occurrence of P is Pₐ and, in the second peptide n-mer, each occurrence of P is P_{b}.

[0202] Embodiment 9. The compound of any one of embodiments 1 to 8, wherein
[0203] the first peptide n-mer is Pₐ - S - Pₐ and the second peptide n-mer is Pₐ - S - Pₐ ; or
[0204] the first peptide n-mer is Pₐ - S - Pₐ and the second peptide n-mer is P_{b} - S - P_{b} ;
[0205] the first peptide n-mer is P_{b}- S - P_{b} and the second peptide n-mer is P_{b} - S - P_{b};
[0206] the first peptide n-mer is Pₐ - S - P_{b} and the second peptide n-mer is Pₐ - S - P_{b};
[0207] the first peptide n-mer is Pₐ - S - P_{b} and the second peptide n-mer is Pₐ - S - Pₐ; or
[0208] the first peptide n-mer is Pₐ - S - P_{b} and the second peptide n-mer is P_{b} - S - P_{b}.

[0209] Embodiment 10. A compound comprising
[0210] a biopolymer scaffold and at least
[0211] a first peptide n-mer which is a peptide dimer of the formula Pₐ - S - Pₐ or Pₐ - S - P_{b},

[0212] wherein Pₐ is a peptide with a sequence length of 6-13 amino acids, preferably 7-11 amino acids, more preferably 7-9 amino acids, P_{b} is a peptide with a sequence length of 6-13 amino acids, preferably 7-11 amino acids, more preferably 7-9 amino acidss, and S is a non-peptide spacer,

[0213] wherein the first peptide n-mer is bound to the biopolymer scaffold, preferably via a linker,

[0214] wherein Pₐ has an amino-acid sequence comprising a sequence fragment with a length of at least six, preferably at least seven, more preferably at least eight, especially at least 9 (or 10, 11, 12 or 13) amino acids of a capsid protein sequence of a (non-pathogenic) viral vector, in particular of an AdV hexon protein sequence, an AdV fiber protein sequence, an AdV penton protein sequence, an AdV IIIa protein sequence, an AdV VI protein sequence, an AdV VIII protein sequence or an AdV IX protein sequence or of any one of the capsid protein sequences identified in FIG. 10 and FIG. 11 or of any one of the capsid protein sequences listed in Cearley et al., 2008, optionally wherein at most three, preferably at most two, most preferably at least one amino acid of the sequence fragment is independently substituted by any other amino acid.

[0215] Embodiment 11. The compound of embodiment 10, further comprising a second peptide n-mer which is a peptide dimer of the formula P_{b} - S - P_{b} or Pₐ - S - P_{b},
[0216] wherein the second peptide n-mer is bound to the biopolymer scaffold, preferably via a linker,
[0217] wherein P_{b} has an amino-acid sequence comprising a sequence fragment with a length of at least six, preferably at least seven, more preferably at least eight, especially at least 9 (or 10, 11, 12 or 13) amino acids of a capsid protein sequence of a (non-pathogenic) viral vector, in particular of an AdV hexon protein sequence, an AdV fiber protein sequence, an AdV penton protein sequence, an AdV IIIa protein sequence, an AdV VI protein sequence, an AdV VIII protein sequence or an AdV IX protein sequence or of any one of the capsid protein sequences identified in FIG. 10 and FIG. 11 or of any one of the capsid protein sequences listed in Cearley et al., 2008, optionally wherein at most three, preferably at most two, most preferably at least one amino acid of the sequence fragment is independently substituted by any other amino acid.

[0218] Embodiment 12. The compound of any one of embodiments 1 to 9 and 11, wherein the first peptide n-mer is different from the second peptide n-mer.

[0219] Embodiment 13. The compound of any one of embodiments 6 to 12, wherein the peptide Pₐ is different from the peptide P_{b}, preferably wherein the peptide Pₐ and the peptide P_{b} are two different epitopes of the same capsid antigen or two different epitope parts of the same capsid epitope.

[0220] Embodiment 14. The compound of any one of embodiments 6 to 13, wherein the peptide Pₐ and the peptide P_{b} comprise the same amino-acid sequence fragment, wherein the amino-acid sequence fragment has a length of at least 2 amino acids, preferably at least 3 amino acids, more preferably at least 4 amino acids, yet more preferably at least 5 amino acids, even more preferably at least 6 amino acids, yet even more preferably at least 7 amino acids, especially at least 8 amino acids or even at least 9 amino acids.

[0221] Embodiment 15. The compound of any one of embodiments 6 to 14, wherein Pₐ and/or P_{b} is circularized.

[0222] Embodiment 16. The compound of any one of embodiments 1 to 15, wherein the compound comprises a plurality of said first peptide n-mer and/or a plurality of said second peptide n-mer.

[0223] Embodiment 17. The compound of any one of embodiments 1 to 16, wherein the biopolymer scaffold is a protein, preferably a mammalian protein such as a human protein, a non-human primate protein, a sheep protein, a pig protein, a dog protein or a rodent protein.

[0224] Embodiment 18. The compound of embodiment 17, wherein the biopolymer scaffold is a globulin.

[0225] Embodiment 19. The compound of embodiment 18, wherein the biopolymer scaffold is selected from the group consisting of immunoglobulins, alpha1-globulins, alpha2-globulins and beta-globulins.

[0226] Embodiment 20. The compound of embodiment 19, wherein the biopolymer scaffold is selected from the group consisting of immunoglobulin G, haptoglobin and transferrin.

[0227] Embodiment 21. The compound of embodiment 20, wherein the biopolymer scaffold is haptoglobin.

[0228] Embodiment 22. The compound of embodiment 17, wherein the biopolymer scaffold is an albumin.

[0229] Embodiment 23. The compound of any one of embodiments 1 to 22, wherein the compound is non-immunogenic in a mammal, preferably in a human, in a non-human primate, in a sheep, in a pig, in a dog or in a rodent.

[0230] Embodiment 24. The compound of any one of embodiments 1 to 23, wherein the compound is for intracorporeal sequestration (or intracorporeal depletion) of at least one antibody (against the viral vector or neutralizing the viral vector) in an individual, preferably in the bloodstream of the individual and/or for reduction of the titre of at least one antibody (against the viral vector or neutralizing the viral vector) in the individual, preferably in the bloodstream of the individual.

[0231] Embodiment 25. The compound of any one of embodiments 1 to 24, wherein the viral vector is an adenovirus (AdV) vector or an adeno-associated virus (AAV) vector.

[0232] Embodiment 26. The compound of any one of embodiments 1 to 25, wherein the entire sequence, optionally with the exception of an N-terminal and/or C-terminal cysteine, of at least one occurrence of P, preferably of at least 10% of all occurrences of P, more preferably of at least 25% of all occurrences of P, yet more preferably of at least 50% of all occurrences of P, even more preferably of at least 75% of all occurrences of P, yet even more preferably of at least 90% of all occurrences of P or even of at least 95% of all occurrences of P, especially of all of the occurrences of P, is identical to a sequence fragment of a protein, wherein the protein is identified by one of the following UniProt accession codes:
[0233] A9RAI0, B5SUY7, 041855, 056137, 056139, P03135, P04133, P04882, P08362, P10269, P12538, P69353, Q5Y9B2, Q5Y9B4, Q65311, Q6JC40, Q6VGT5, Q8JQF8, Q8JQG0, Q98654, Q9WBP8, Q9YIJ1, or of an AdV hexon protein, an AdV fiber protein, an AdV penton protein, an AdV IIIa protein, an AdV VI protein, an AdV VIII protein or an AdV IX protein or of any one of the capsid proteins identified in FIG. 10 and FIG. 11 or of any one of the capsid proteins listed in Cearley et al., 2008;
[0234] optionally wherein the sequence fragment comprises at most three, even more preferably at most two, especially at most one amino acid substitutions.

[0235] Embodiment 27. The compound of any one of embodiments 1 to 26, wherein the entire sequence, optionally with the exception of an N-terminal and/or C-terminal cysteine, of peptide Pₐ is identical to a sequence fragment of a protein, wherein the protein is identified by one of the UniProt accession codes listed in embodiment 26;

[0236] optionally wherein the sequence fragment comprises at most three, even more preferably at most two, especially at most one amino acid substitutions.

[0237] Embodiment 28. The compound of any one of embodiments 1 to 27, wherein the entire sequence, optionally with the exception of an N-terminal and/or C-terminal cysteine, of peptide P_{b} is identical to a sequence fragment of a protein, wherein the protein is identified by one of the UniProt accession codes listed in embodiment 26;

[0238] optionally wherein the sequence fragment comprises at most three, even more preferably at most two, especially at most one amino acid substitutions.

[0239] Embodiment 29. The compound of any one of embodiments 1 to 28, wherein the entire sequence, optionally with the exception of an N-terminal and/or C-terminal cysteine, of peptide Pₐ is identical to a sequence fragment of a protein and the entire sequence, optionally with the exception of an N-terminal and/or C-terminal cysteine, of peptide P_{b} is identical to the same or another, preferably another, sequence fragment of the same protein, wherein the protein is identified by one of the UniProt accession codes listed in embodiment 26;

[0240] optionally wherein the sequence fragment comprises at most three, even more preferably at most two, especially at most one amino acid substitutions.

[0241] Embodiment 30. The compound of any one of embodiments 1 to 29, wherein said sequence fragment comprises a sequence of at least 4 or at least 5 or at least 6, preferably at least 7, more preferably at least 8, even more preferably at least 9, yet even more preferably at least 10 consecutive amino acids selected from:
[0242] the group of AdV sequences ETGPPTVPFLTPPF (SEQ ID NO: 32), HDSKLSIATQGPL (SEQ ID NO: 33), LNLRLGQGPLFINSAHNLDINY (SEQ ID NO: 34), VDPMDEPTLLYVLFEVFDVV (SEQ ID NO: 35), MKRARPSEDTFNPVYPYD (SEQ ID NO: 36), ISGTVQSAHLIIRFD (SEQ ID NO: 37), LGQGPLFINSAHNLDINYNKGLYLF (SEQ ID NO: 38), SYPFDAQNQLNLRLGQGPLFIN (SEQ ID NO: 39), GDTTPSAYSMSFSWDWSGHNYIN (SEQ ID NO: 40), VLLNNSFLDPEYWNFRN (SEQ ID NO: 41), HNYINEIFATSSYTFSYIA (SEQ ID NO: 42), DEAATALEINLEEEDDDNEDEVDEQAEQQKTH (SEQ ID NO: 43), INLEEEDDDNEDEVDEQAEQ (SEQ ID NO: 44), DNEDEVDEQAEQQKTHVF (SEQ ID NO: 45), EWDEAATALEINLEE (SEQ ID NO: 46), PKVVLYSEDVDIETPDTHISYMP (SEQ ID NO: 47), YIPESYKDRMYSFFRNF (SEQ ID NO: 48), DSIGDRTRYFSMW (SEQ ID NO: 49), SYKDRMYSFFRNF (SEQ ID NO: 50), and FLVQMLANYNIGYQGFY (SEQ ID NO: 51), or the group of AAV sequences WQNRDVYLQGPIWAKIP (SEQ ID NO: 52), DNTYFGYSTPWGYFDFNRFHC (SEQ ID NO: 53), MANQAKNWLPGPCY (SEQ ID NO: 54), LPYVLGSAHQGCLPPFP (SEQ ID NO: 55), NGSQAVGRSSFYCLEYF (SEQ ID NO: 56), PLIDQYLYYL (SEQ ID NO: 57), EERFFPSNGILIF (SEQ ID NO: 58) ADGVGSSSGNWHC (SEQ ID NO: 59), SEQ ID NOs: 383-1891 (see Table 1) - preferably group III of Table 1, more preferably group II of Table 1, especially group I of Table 1 - and SEQ ID NOs: 1892-2063 (see Table 2) - preferably group I of Table 2 -and sequences of group II or III of Table 3 (in particular SEQ ID NOs: 2064-2103), more preferably sequences of group I of Table 3, or
[0243] the group of sequences of Table 4, in particular the group of sequences identified by SEQ ID NOs: 2104-2190;
[0244] optionally wherein at most three, preferably at most two, most preferably at least one amino acid of the sequence fragment is independently substituted by any other amino acid.

[0245] Embodiment 31. The compound of any one of embodiments 1 to 30, wherein, independently for each occurrence, P comprises a 6-amino-acid fragment, preferably a 7-amino-acid-fragment, more preferably a 8-amino-acid-fragment, even more preferably a 9-amino-acid fragment, yet even more preferably a 10-amino-acid fragment, especially an entire sequence selected from the group of sequences consisting of GPPTVPFLTP (SEQ ID NO: 60), ETGPPTVPFLTPP (SEQ ID NO: 61), TGPPTVPFLT (SEQ ID NO: 62), PTVPFLTPPF (SEQ ID NO: 63), HDSKLSIATQGPL (SEQ ID NO: 64), SIATQGP (SEQ ID NO: 65), NLRLGQGPLF (SEQ ID NO: 66), QGPLFINSAH (SEQ ID NO: 67), PLFINSAHNLD (SEQ ID NO: 68), LGQGPLF (SEQ ID NO: 69), LNLRLGQGPL (SEQ ID NO: 70), GQGPLFI (SEQ ID NO: 71), NLRLGQGPLFINS (SEQ ID NO: 72), LFINSAHNLDINY (SEQ ID NO: 73), FINSAHNLDI (SEQ ID NO: 74), LRLGQGPLFI (SEQ ID NO: 75), GPLFINSAHN (SEQ ID NO: 76), DEPTLLYVLFEVF (SEQ ID NO: 77), TLLYVLFEVF (SEQ ID NO: 78), DEPTLLYVLF (SEQ ID NO: 79), TLLYVLFEVFDVV (SEQ ID NO: 80), TLLYVLF (SEQ ID NO: 81), MDEPTLLYVLFEV (SEQ ID NO: 82), EPTLLYVLFE (SEQ ID NO: 83), DPMDEPTLLYVLF (SEQ ID NO: 84), LLYVLFEVFD (SEQ ID NO: 85), YVLFEVFDVV (SEQ ID NO: 86), PTLLYVLFEV (SEQ ID NO: 87), PTLLYVLFEVFDV (SEQ ID NO: 88), LYVLFEVFDV (SEQ ID NO: 89), EPTLLYVLFEVFD (SEQ ID NO: 90), LYVLFEV (SEQ ID NO: 91), PMDEPTLLYVLFE (SEQ ID NO: 92), LLYVLFE (SEQ ID NO: 93), VDPMDEPTLLYVL (SEQ ID NO: 94), YVLFEVF (SEQ ID NO: 95), PTLLYVL (SEQ ID NO: 96), MKRARPSEDTF (SEQ ID NO: 97), KRARPSEDTF (SEQ ID NO: 98), MKRARPSEDT (SEQ ID NO: 99), MKRARPSEDTFN (SEQ ID NO: 100), ARPSEDTFNP (SEQ ID NO: 101), RARPSEDTFN (SEQ ID NO: 102), RPSEDTF (SEQ ID NO: 103), MKRARPSEDTFNP (SEQ ID NO: 104), RARPSEDTFNPVY (SEQ ID NO: 105), ARPSEDT (SEQ ID NO: 106), EDTFNPVYPY (SEQ ID NO: 107), RPSEDTFNPVYPY (SEQ ID NO: 108), KRARPSEDTFNPV (SEQ ID NO: 109), DTFNPVY (SEQ ID NO: 110), RPSEDTFNPV (SEQ ID NO: 111), PSEDTFNPVY (SEQ ID NO: 112), DTFNPVYPYD (SEQ ID NO: 113), VQSAHLIIRF (SEQ ID NO: 114), AHLIIRF (SEQ ID NO: 115), SGTVQSAHLIIRF (SEQ ID NO: 116), TVQSAHLIIR (SEQ ID NO: 117), HLIIRFD (SEQ ID NO: 118), SAHLIIR (SEQ ID NO: 119), QSAHLIIRFD (SEQ ID NO: 120), ISGTVQSAHLIIR (SEQ ID NO: 121), GTVQSAHLII (SEQ ID NO: 122), GTVQSAHLIIRFD (SEQ ID NO: 123), QSAHLII (SEQ ID NO: 124), HNLDINY (SEQ ID NO: 125), LFINSAHNLDINY (SEQ ID NO: 126), NLDINYNKGLYLF (SEQ ID NO: 127), FVSPNG (SEQ ID NO: 128), NYINEIF (SEQ ID NO: 129), NKGLYLF (SEQ ID NO: 130), INYNKGLYLF (SEQ ID NO: 131), NSAHNLDINY (SEQ ID NO: 132), WDWSGHNYINEIF (SEQ ID NO: 133), SGHNYINEIF (SEQ ID NO: 134), LGTGLSF (SEQ ID NO: 135), PFLTPPF (SEQ ID NO: 136), LGQGPLF (SEQ ID NO: 137), NLRLGQGPLF (SEQ ID NO: 138), NQLNLRLGQGPLF (SEQ ID NO: 139), GQGPLFI (SEQ ID NO: 140), QLNLRLGQGPLFI (SEQ ID NO: 141), SYPFDAQNQLNLR (SEQ ID NO: 142), YPFDAQNQLNLRL (SEQ ID NO: 143), LRLGQGPLFI (SEQ ID NO: 144), NQLNLRL (SEQ ID NO: 145), FDAQNQLNLR (SEQ ID NO: 146), QNQLNLR (SEQ ID NO: 147), QGPLFIN (SEQ ID NO: 148), PFDAQNQLNLRLG (SEQ ID NO: 149), DAQNQLNLRL (SEQ ID NO: 150), RLGQGPLFIN (SEQ ID NO: 151), QLNLRLG (SEQ ID NO: 152), FDAQNQLNLRLGQ (SEQ ID NO: 153), LNLRLGQGPLFIN (SEQ ID NO: 154), AQNQLNLRLG (SEQ ID NO: 155), AQNQLNL (SEQ ID NO: 156), LNLRLGQ (SEQ ID NO: 157), SYPFDAQNQL (SEQ ID NO: 158), PFDAQNQLNL (SEQ ID NO: 159), YSMSFSW (SEQ ID NO: 160), TPSAYSMSFSWDW (SEQ ID NO: 161), MSFSWDW (SEQ ID NO: 162), PSAYSMSFSW (SEQ ID NO: 163), DTTPSAYSMSFSW (SEQ ID NO: 164), TTPSAYSMSF (SEQ ID NO: 165), YSMSFSWDWS (SEQ ID NO: 166), TGDTTPSAYSMSF (SEQ ID NO: 167), FSWDWSGHNY (SEQ ID NO: 168), SFSWDWS (SEQ ID NO: 169), SAYSMSF (SEQ ID NO: 170), SFSWDWSGHN (SEQ ID NO: 171), SAYSMSFSWD (SEQ ID NO: 172), SMSFSWD (SEQ ID NO: 173), SWDWSGHNYI (SEQ ID NO: 174), AYSMSFS (SEQ ID NO: 175), SMSFSWDWSGHNY (SEQ ID NO: 176), FSWDWSG (SEQ ID NO: 177), SWDWSGH (SEQ ID NO: 178), FLDPEYWNFR (SEQ ID NO: 179), SFLDPEYWNF (SEQ ID NO: 180), PEYWNFR (SEQ ID NO: 181), LNNSFLDPEYWNF (SEQ ID NO: 182), NNSFLDPEYWNFR (SEQ ID NO: 183), FLDPEYW (SEQ ID NO: 184), DPEYWNF (SEQ ID NO: 185), NNSFLDPEYW (SEQ ID NO: 186), VLLNNSFLDPEYW (SEQ ID NO: 187), EYWNFRN (SEQ ID NO: 188), LNNSFLDPEY (SEQ ID NO: 189), LDPEYWNFRN (SEQ ID NO: 190), LNNSFLD (SEQ ID NO: 191), NSFLDPEYWN (SEQ ID NO: 192), SSYTFSY (SEQ ID NO: 193), FATSSYTFSY (SEQ ID NO: 194), YINEIFATSSYTF (SEQ ID NO: 195), SYTFSYI (SEQ ID NO: 196), ATSSYTF (SEQ ID NO: 197), EIFATSSYTF (SEQ ID NO: 198), NEIFATSSYTFSY (SEQ ID NO: 199), ATSSYTFSYI (SEQ ID NO: 200), HNYINEIFATSSY (SEQ ID NO: 201), IFATSSY (SEQ ID NO: 202), INEIFATSSY (SEQ ID NO: 203), NYINEIFATSSYT (SEQ ID NO: 204), YINEIFA (SEQ ID NO: 205), YTFSYIA (SEQ ID NO: 206), EIFATSSYTFSYI (SEQ ID NO: 207), ALEINLEEEDDDN (SEQ ID NO: 208), ATALEINLEEEDD (SEQ ID NO: 209), EAATALEINLEEE (SEQ ID NO: 210), LEINLEE (SEQ ID NO: 211), TALEINLEEEDDD (SEQ ID NO: 212), EINLEEE (SEQ ID NO: 213), ALEINLEEED (SEQ ID NO: 214), LEINLEEEDD (SEQ ID NO: 215), TALEINLEEE (SEQ ID NO: 216), DEAATALEINLEE (SEQ ID NO: 217), LEINLEEEDDDNE (SEQ ID NO: 218), AATALEINLEEED (SEQ ID NO: 219), EINLEEEDDD (SEQ ID NO: 220), ATALEINLEE (SEQ ID NO: 221), INLEEEDDDN (SEQ ID NO: 222), NLEEEDDDNE (SEQ ID NO: 223), DEVDEQA (SEQ ID NO: 224), EDDDNEDEVDEQA (SEQ ID NO: 225), DDNEDEVDEQAEQ (SEQ ID NO: 226), EVDEQAE (SEQ ID NO: 227), DNEDEVDEQA (SEQ ID NO: 228), VDEQAEQ (SEQ ID NO: 229), EDEVDEQAEQQKT (SEQ ID NO: 230), EDEVDEQAEQ (SEQ ID NO: 231), DEVDEQAEQQKTH (SEQ ID NO: 232), NEDEVDEQAEQQK (SEQ ID NO: 233), DEVDEQAEQQ (SEQ ID NO: 234), EINLEEEDDDNED (SEQ ID NO: 235), NLEEEDDDNEDEV (SEQ ID NO: 236), INLEEED (SEQ ID NO: 237), LEEEDDDNED (SEQ ID NO: 238), INLEEEDDDNEDE (SEQ ID NO: 239), DDDNEDEVDEQAE (SEQ ID NO: 240), LEEEDDDNEDEVD (SEQ ID NO: 241), DDNEDEVDEQ (SEQ ID NO: 242), EDDDNED (SEQ ID NO: 243), NLEEEDD (SEQ ID NO: 244), DDNEDEV (SEQ ID NO: 245), DDDNEDEVDE (SEQ ID NO: 246), DDDNEDE (SEQ ID NO: 247), EEEDDDNEDE (SEQ ID NO: 248), EEDDDNE (SEQ ID NO: 249), EDDDNEDEVD (SEQ ID NO: 250), EDEVDEQ (SEQ ID NO: 251), EEDDDNEDEVDEQ (SEQ ID NO: 252), EEDDDNEDEV (SEQ ID NO: 253), EEEDDDNEDEVDE (SEQ ID NO: 254), EVDEQAEQQK (SEQ ID NO: 255), DNEDEVDEQAEQQ (SEQ ID NO: 256), VDEQAEQQKT (SEQ ID NO: 257), EVDEQAEQQKTHV (SEQ ID NO: 258), VDEQAEQQKTHVF (SEQ ID NO: 259), ALEINLE (SEQ ID NO: 260), WDEAATALEINLE (SEQ ID NO: 261), AATALEINLE (SEQ ID NO: 262), EWDEAATALEINL (SEQ ID NO: 263), EAATALEINL (SEQ ID NO: 264), LYSEDVDIET (SEQ ID NO: 265), LYSEDVDIETPDT (SEQ ID NO: 266), KVVLYSEDVDIET (SEQ ID NO: 267), IETPDTH (SEQ ID NO: 268), VDIETPDTHI (SEQ ID NO: 269), VLYSEDVDIE (SEQ ID NO: 270), DVDIETPDTHISY (SEQ ID NO: 271), VVLYSEDVDIETP (SEQ ID NO: 272), SEDVDIETPDTHI (SEQ ID NO: 273), ETPDTHI (SEQ ID NO: 274), VLYSEDVDIETPD (SEQ ID NO: 275), DVDIETPDTH (SEQ ID NO: 276), DIETPDTHIS (SEQ ID NO: 277), EDVDIETPDTHIS (SEQ ID NO: 278), IETPDTHISY (SEQ ID NO: 279), YSEDVDIETPDTH (SEQ ID NO: 280), VDIETPDTHISYM (SEQ ID NO: 281), PKVVLYSEDVDIE (SEQ ID NO: 282), DIETPDT (SEQ ID NO: 283), DIETPDTHISYMP (SEQ ID NO: 284), EDVDIETPDT (SEQ ID NO: 285), ETPDTHISYM (SEQ ID NO: 286), IETPDTHISYMP (SEQ ID NO: 287), DRMYSFFRNF (SEQ ID NO: 288), DRMYSFF (SEQ ID NO: 289), YSFFRNF (SEQ ID NO: 290), IPESYKDRMYSFF (SEQ ID NO: 291), SYKDRMYSFF (SEQ ID NO: 292), ESYKDRMYSF (SEQ ID NO: 293), KDRMYSF (SEQ ID NO: 294), YIPESYKDRMYSF (SEQ ID NO: 295), PESYKDRMYSFFR (SEQ ID NO: 296), YKDRMYSFFR (SEQ ID NO: 297), TRYFSMW (SEQ ID NO: 298), GDRTRYF (SEQ ID NO: 299), DSIGDRTRYF (SEQ ID NO: 300), DSIGDRTRYFSMW (SEQ ID NO: 301), GDRTRYFSMW (SEQ ID NO: 302), DRMYSFFRNF (SEQ ID NO: 303), SYKDRMYSFFRNF (SEQ ID NO: 304), NYNIGYQGFY (SEQ ID NO: 305), ANYNIGYQGF (SEQ ID NO: 306), MLANYNIGYQGFY (SEQ ID NO: 307), IGYQGFY (SEQ ID NO: 308), FLVQMLANYNIGY (SEQ ID NO: 309), NIGYQGF (SEQ ID NO: 310) and QMLANYNIGYQGF (SEQ ID NO: 311), optionally wherein at most three, preferably at most two, most preferably at least one amino acid is independently substituted by any other amino acid.

[0246] Embodiment 32. The compound of any one of embodiments 1 to 30, wherein, independently for each occurrence, P comprises a 6-amino-acid fragment, preferably a 7-amino-acid-fragment, more preferably a 8-amino-acid-fragment, even more preferably a 9-amino-acid fragment, yet even more preferably a 10-amino-acid fragment, especially an entire sequence selected from the group of sequences consisting of YLQGPIW (SEQ ID NO: 312), VYLQGPI (SEQ ID NO: 313), WQNRDVY (SEQ ID NO: 314), DVYLQGP (SEQ ID NO: 315), QNRDVYL (SEQ ID NO: 316), LQGPIWA (SEQ ID NO: 317), RDVYLQG (SEQ ID NO: 318), NRDVYLQ (SEQ ID NO: 319), YFGYSTPWGYFDF (SEQ ID NO: 320), FGYSTPWGYF (SEQ ID NO: 321), GYSTPWGYFD (SEQ ID NO: 322), YSTPWGYFDF (SEQ ID NO: 323), NTYFGYSTPWGYF (SEQ ID NO: 324), TPWGYFDFNRFHC (SEQ ID NO: 325), TYFGYSTPWGYFD (SEQ ID NO: 326), DNTYFGYSTPWGY (SEQ ID NO: 327), YFGYSTPWGY (SEQ ID NO: 328), FGYSTPWGYFDFN (SEQ ID NO: 329), NWLPGPC (SEQ ID NO: 330), WLPGPCY (SEQ ID NO: 331), QAKNWLPGPC (SEQ ID NO: 332), AKNWLPGPCY (SEQ ID NO: 333), MANQAKNWLPGPC (SEQ ID NO: 334), QGCLPPF (SEQ ID NO: 335), GCLPPFP (SEQ ID NO: 336), VLGSAHQGCLPPF (SEQ ID NO: 337), LPYVLGSAHQGCL (SEQ ID NO: 338), YVLGSAHQGC (SEQ ID NO: 339), CLPPFPA (SEQ ID NO: 340), SAHQGCLPPF (SEQ ID NO: 341), VLGSAHQGCL (SEQ ID NO: 342), PYVLGSAHQGCLP (SEQ ID NO: 343), GRSSFYC (SEQ ID NO: 344), AVGRSSFYCLEYF (SEQ ID NO: 345), AVGRSSFYCL (SEQ ID NO: 346), QAVGRSSFYCLEY (SEQ ID NO: 347), NGSQAVGRSSFYC (SEQ ID NO: 348), DQYLYYL (SEQ ID NO: 349), PLIDQYLYYL (SEQ ID NO: 350), IDQYLYY (SEQ ID NO: 351), FFPSNGILIF (SEQ ID NO: 352), EERFFPSNGILIF (SEQ ID NO: 353), VGSSSGNWHC (SEQ ID NO: 354) and ADGVGSSSGNWHC (SEQ ID NO: 355), optionally wherein at most three, preferably at most two, most preferably at least one amino acid is independently substituted by any other amino acid; or wherein, independently for each occurrence, P comprises a 6-amino-acid fragment, preferably a 7-amino-acid-fragment, more preferably a 8-amino-acid-fragment, even more preferably a 9-amino-acid fragment, yet even more preferably a 10-amino-acid fragment or even a 11-amino-acid-fragment or yet even a 12-amino-acid-fragment, especially a 13-amino-acid-fragment selected from the group of sequences consisting of SEQ ID NOs: 383-1891 (see Table 1) - preferably group III of Table 1, more preferably group II of Table 1, especially group I of Table 1 - and SEQ ID NOs: 1892-2063 (see Table 2) - preferably group I of Table 2 - and sequences of group II or III of Table 3 (in particular SEQ ID NOs: 2064-2103), more preferably sequences of group I of Table 3, optionally wherein at most three, preferably at most two, most preferably at least one amino acid is independently substituted by any other amino acid; or wherein, independently for each occurrence, P comprises a 6-amino-acid fragment, preferably a 7-amino-acid-fragment, more preferably a 8-amino-acid-fragment, even more preferably a 9-amino-acid fragment, yet even more preferably a 10-amino-acid fragment or even a 11-amino-acid-fragment or yet even a 12-amino-acid-fragment, especially a 13-amino-acid-fragment selected from the group of sequences of Table 4, in particular the group of sequences identified by SEQ ID NOs: 2104-2190, optionally wherein at most three, preferably at most two, most preferably at least one amino acid is independently substituted by any other amino acid.

[0247] Embodiment 33. The compound of any one of embodiments 1 to 32, wherein, independently for each occurrence, P consists of a 6-amino-acid fragment, preferably a 7-amino-acid-fragment, more preferably a 8-amino-acid-fragment, even more preferably a 9-amino-acid fragment, yet even more preferably a 10-amino-acid fragment, especially an entire sequence selected from the group of sequences set forth in embodiment 31 or selected from the group of sequences set forth in embodiment 32, optionally wherein at most three, preferably at most two, most preferably at least one amino acid is independently substituted by any other amino acid, optionally with an N-terminal and/or C-terminal cysteine residue.

[0248] Embodiment 34. The compound of any one of embodiments 1 to 33, wherein each of the peptide n-mers is covalently bound to the biopolymer scaffold, preferably via a linker each.

[0249] Embodiment 35. The compound of any one of embodiments 1 to 34, wherein at least one of said linkers is selected from disulphide bridges and PEG molecules.

[0250] Embodiment 36. The compound of any one of embodiments 1 to 35, wherein at least one of the spacers S is selected from PEG molecules or glycans.

[0251] Embodiment 37. The compound of any one of embodiments 1 to 36, wherein Pₐ comprises a 6-amino-acid fragment, preferably a 7-amino-acid-fragment, more preferably a 8-amino-acid-fragment, even more preferably a 9-amino-acid fragment, yet even more preferably a 10-amino-acid fragment, especially an entire sequence selected from the group of sequences set forth in embodiment 31, optionally wherein at most three, preferably at most two, most preferably at least one amino acid is independently substituted by any other amino acid.

[0252] Embodiment 38. The compound of any one of embodiments 1 to 37, wherein P_{b} comprises a 6-amino-acid fragment, preferably a 7-amino-acid-fragment, more preferably a 8-amino-acid-fragment, even more preferably a 9-amino-acid fragment, yet even more preferably a 10-amino-acid fragment, especially an entire sequence selected from the group of sequences set forth in embodiment 31, optionally wherein at most three, preferably at most two, most preferably at least one amino acid is independently substituted by any other amino acid.

[0253] Embodiment 39. The compound of any one of embodiments 1 to 36, wherein Pₐ comprises a 6-amino-acid fragment, preferably a 7-amino-acid-fragment, more preferably a 8-amino-acid-fragment, even more preferably a 9-amino-acid fragment, yet even more preferably a 10-amino-acid fragment, especially an entire sequence selected from the group of sequences set forth in embodiment 32, optionally wherein at most three, preferably at most two, most preferably at least one amino acid is independently substituted by any other amino acid.

[0254] Embodiment 40. The compound of any one of embodiments 1 to 37, wherein P_{b} comprises a 6-amino-acid fragment, preferably a 7-amino-acid-fragment, more preferably a 8-amino-acid-fragment, even more preferably a 9-amino-acid fragment, yet even more preferably a 10-amino-acid fragment, especially an entire sequence selected from the group of sequences set forth in embodiment 32, optionally wherein at most three, preferably at most two, most preferably at least one amino acid is independently substituted by any other amino acid.

[0255] Embodiment 41. The compound of any one of embodiments 6 to 40, wherein the first peptide n-mer is Pₐ - S - P_{b} and the second peptide n-mer is Pₐ - S - P_{b}.

[0256] Embodiment 42. The compound of any one of embodiments 6 to 41, wherein the peptide Pₐ and the peptide P_{b} comprise the same amino-acid sequence fragment, wherein the amino-acid sequence fragment has a length of at least 5 amino acids, even more preferably at least 6 amino acids, yet even more preferably at least 7 amino acids, especially at least 8 amino acids or even at least 9 amino acids.

[0257] Embodiment 43. The compound of any one of embodiments 1 to 42, wherein Pₐ consists of a 6-amino-acid fragment, preferably a 7-amino-acid-fragment, more preferably a 8-amino-acid-fragment, even more preferably a 9-amino-acid fragment, yet even more preferably a 10-amino-acid fragment, especially an entire sequence selected from the group of sequences set forth in embodiment 31, optionally wherein at most three, preferably at most two, most preferably at least one amino acid is independently substituted by any other amino acid, optionally with an N-terminal and/or C-terminal cysteine residue.

[0258] Embodiment 44. The compound of any one of embodiments 1 to 43, wherein P_{b} consists of a 6-amino-acid fragment, preferably a 7-amino-acid-fragment, more preferably a 8-amino-acid-fragment, even more preferably a 9-amino-acid fragment, yet even more preferably a 10-amino-acid fragment, especially an entire sequence selected from the group of sequences set forth in embodiment 31, optionally wherein at most three, preferably at most two, most preferably at least one amino acid is independently substituted by any other amino acid, optionally with an N-terminal and/or C-terminal cysteine residue.

[0259] Embodiment 45. The compound of any one of embodiments 1 to 42, wherein Pₐ consists of a 6-amino-acid fragment, preferably a 7-amino-acid-fragment, more preferably a 8-amino-acid-fragment, even more preferably a 9-amino-acid fragment, yet even more preferably a 10-amino-acid fragment, especially an entire sequence selected from the group of sequences set forth in embodiment 32, optionally wherein at most three, preferably at most two, most preferably at least one amino acid is independently substituted by any other amino acid, optionally with an N-terminal and/or C-terminal cysteine residue.

[0260] Embodiment 46. The compound of any one of embodiments 1 to 43, wherein P_{b} consists of a 6-amino-acid fragment, preferably a 7-amino-acid-fragment, more preferably a 8-amino-acid-fragment, even more preferably a 9-amino-acid fragment, yet even more preferably a 10-amino-acid fragment, especially an entire sequence selected from the group of sequences set forth in embodiment 32, optionally wherein at most three, preferably at most two, most preferably at least one amino acid is independently substituted by any other amino acid, optionally with an N-terminal and/or C-terminal cysteine residue Embodiment 47. The compound of embodiments 1 to 46, wherein the first peptide n-mer is Pₐ - S - P_{b} and the second peptide n-mer is Pₐ - S - P_{b.}

[0261] Embodiment 48. The compound of embodiments 1 to 47, wherein the peptide Pₐ and the peptide P_{b} comprise the same amino-acid sequence fragment, wherein the amino-acid sequence fragment has a length of at least 5 amino acids, even more preferably at least 6 amino acids, yet even more preferably at least 7 amino acids, especially at least 8 amino acids or even at least 9 amino acids.

[0262] Embodiment 49. The compound of any one of embodiments 1 to 48, wherein the viral vector is non-pathogenic (in the individual to be treated).

[0263] Embodiment 50. The compound of any one of embodiments 1 to 49, wherein the biopolymer scaffold is an anti-CD163 antibody (i.e. an antibody specific for a CD163 protein) or CD163-binding fragment thereof.

[0264] Embodiment 51. The compound of embodiment 50, wherein the anti-CD163 antibody or CD163-binding fragment thereof is specific for human CD163 and/or is specific for the extracellular region of CD163, preferably for an SRCR domain of CD163, more preferably for any one of SRCR domains 1-9 of CD163, even more preferably for any one of SRCR domains 1-3 of CD163, especially for SRCR domain 1 of CD163.

[0265] Embodiment 52. The compound of embodiment 50 or 51, wherein the anti-CD163 antibody or CD163-binding fragment thereof is specific for one of the following peptides:
[0266] a peptide consisting of 7-25, preferably 8-20, even more preferably 9-15, especially 10-13 amino acids, wherein the peptide comprises the amino acid sequence CSGRVEVKVQEEWGTVCNNGWSMEA (SEQ ID NO: 3) or a 7-24 amino-acid fragment thereof,
[0267] a peptide consisting of 7-25, preferably 8-20, even more preferably 9-15, especially 10-13 amino acids, wherein the peptide comprises the amino acid sequence DHVSCRGNESALWDCKHDGWG (SEQ ID NO: 13) or a 7-20 amino-acid fragment thereof, or
[0268] a peptide consisting of 7-25, preferably 8-20, even more preferably 9-15, especially 10-13 amino acids, wherein the peptide comprises the amino acid sequence SSLGGTDKELRLVDGENKCS (SEQ ID NO: 24) or a 7-19 amino-acid fragment thereof.

[0269] Embodiment 53. The compound of embodiment 50 or 51, wherein the anti-CD163 antibody or CD163-binding fragment thereof is specific for a peptide comprising the amino acid sequence ESALW (SEQ ID NO: 14) or ALW.

[0270] Embodiment 54. The compound of embodiment 50 or 51, wherein the anti-CD163 antibody or CD163-binding fragment thereof is specific for a peptide comprising the amino acid sequence GRVEVKVQEEW (SEQ ID NO: 4), WGTVCNNGWS (SEQ ID NO: 5) or WGTVCNNGW (SEQ ID NO: 6).

[0271] Embodiment 55. The compound of embodiment 50 or 51, wherein the anti-CD163 antibody or CD163-binding fragment thereof is specific for a peptide comprising the amino acid sequence SSLGGTDKELR (SEQ ID NO: 25) or SSLGG (SEQ ID NO: 26).

[0272] Embodiment 56. The compound of any one of embodiments 1 to 55, wherein the viral vector is AAV1, AAV2, AAV3, AAV5, AAV7 or AAV8.

[0273] Embodiment 57. The compound of any one of embodiments 1 to 55, wherein the viral vector is AAV8.

[0274] Embodiment 58. The compound of any one of embodiments 1 to 55, wherein the viral vector is Ad5.

[0275] Embodiment 59. The compound of any one of embodiments 58, wherein the viral vector is AdHu5.

[0276] Embodiment 60. The compound of any one of embodiments 1 to 59, wherein the viral vector is a viral vector specific for a mammal, in particular a human.

[0277] Embodiment 61. The compound of any one of embodiments 1 to 60, wherein the biopolymer scaffold is selected from human immunoglobulins and human transferrin.

[0278] Embodiment 62. The compound of embodiment any one of embodiments 1 to 61, wherein the biopolymer scaffold is human transferrin.

[0279] Embodiment 63. The compound of any one of embodiments 49 to 62, wherein at least one of the at least two peptides is circularized.

[0280] Embodiment 64. The compound of any one of embodiments 1 to 63, wherein the compound is non-immunogenic in humans.

[0281] Embodiment 65. A pharmaceutical composition comprising the compound of any one of embodiments 1 to 64 and at least one pharmaceutically acceptable excipient.

[0282] Embodiment 66. The pharmaceutical composition of embodiment 65, wherein the composition is prepared for intraperitoneal, subcutaneous, intramuscular and/or intravenous administration and/or wherein the composition is for repeated administration.

[0283] Embodiment 67. The pharmaceutical composition of any one of embodiments 1 to 66, wherein the molar ratio of peptide P to biopolymer scaffold in the composition is from 2:1 to 100:1, preferably from 3:1 to 90:1, more preferably from 4:1 to 80:1, even more preferably from 5:1 to 70:1, yet even more preferably from 6:1 to 60:1, especially from 7:1 to 50:1 or even from 8:10 to 40:1.

[0284] Embodiment 68. The pharmaceutical composition of any one of embodiments 6 to 67, wherein the molar ratio of peptide Pₐ to biopolymer scaffold in the composition is from 2:1 to 100:1, preferably from 3:1 to 90:1, more preferably from 4:1 to 80:1, even more preferably from 5:1 to 70:1, yet even more preferably from 6:1 to 60:1, especially from 7:1 to 50:1 or even from 8:10 to 40:1.

[0285] Embodiment 69. The pharmaceutical composition of any one of embodiments 6 to 68, wherein the molar ratio of peptide P_{b} to biopolymer scaffold in the composition is from 2:1 to 100:1, preferably from 3:1 to 90:1, more preferably from 4:1 to 80:1, even more preferably from 5:1 to 70:1, yet even more preferably from 6:1 to 60:1, especially from 7:1 to 50:1 or even from 8:10 to 40:1.

[0286] Embodiment 70. The pharmaceutical composition of any one of embodiments 65 to 69 for use in therapy.

[0287] Embodiment 71. The pharmaceutical composition for use according to embodiment 70, for use in increasing efficacy of a vaccine in an individual, wherein the vaccine comprises the viral vector, preferably wherein the pharmaceutical composition is administered to the individual prior to or concurrently with administration of the vaccine.

[0288] Embodiment 72. The pharmaceutical composition for use according to embodiment 71, wherein the pharmaceutical composition is administered at least twice within a 96-hour window, preferably within a 72-hour window, more preferably within a 48-hour window, even more preferably within a 36-hour window, yet even more preferably within a 24-hour window, especially within a 18-hour window or even within a 12-hour window; preferably wherein this window is followed by administration of the vaccine within 24 hours, preferably within 12 hours.

[0289] Embodiment 73. The pharmaceutical composition for use according to embodiment 70, for use in increasing efficacy of a gene therapy composition in an individual, wherein the gene therapy composition comprises the viral vector, preferably wherein the pharmaceutical composition is administered to the individual prior to or concurrently with administration of the gene therapy composition.

[0290] Embodiment 74. The pharmaceutical composition for use according to embodiment 73, wherein the pharmaceutical composition is administered at least twice within a 96-hour window, preferably within a 72-hour window, more preferably within a 48-hour window, even more preferably within a 36-hour window, yet even more preferably within a 24-hour window, especially within a 18-hour window or even within a 12-hour window; preferably wherein this window is followed by administration of the gene therapy composition within 24 hours, preferably within 12 hours.

[0291] Embodiment 75. The pharmaceutical composition for use according to any one of embodiments 71 to 74, wherein the individual is human.

[0292] Embodiment 76. The pharmaceutical composition for use according to any one of embodiments 70 to 75, wherein one or more antibodies are present in the individual which are specific for at least one occurrence of peptide P, or for peptide Pₐ and/or peptide P_{b}, preferably wherein said antibodies are neutralizing antibodies for said viral vector.

[0293] Embodiment 77. The pharmaceutical composition for use according to any one of embodiments 70 to 76, wherein the composition is non-immunogenic in the individual.

[0294] Embodiment 78. The pharmaceutical composition for use according to any one of embodiments 70 to 77, wherein the composition is administered at a dose of 1-1000 mg, preferably 2-500 mg, more preferably 3-250 mg, even more preferably 4-100 mg, especially 5-50 mg, compound per kg body weight of the individual.

[0295] Embodiment 79. The pharmaceutical composition for use according to any one of embodiments 70 to 78, wherein the composition is administered intraperitoneally, subcutaneously, intramuscularly or intravenously.

[0296] Embodiment 80. A method of sequestering (or depleting) one or more antibodies present in an individual, comprising
[0297] obtaining a pharmaceutical composition as defined in any one of embodiments 65 to 69, wherein the composition is non-immunogenic in the individual and wherein the one or more antibodies present in the individual are specific for at least one occurrence of P, or for peptide Pₐ and/or peptide P_{b}; and
[0298] administering the pharmaceutical composition to the individual.

[0299] Embodiment 81. The method of embodiment 80, wherein the individual is a non-human animal, preferably a non-human primate, a sheep, a pig, a dog or a rodent, in particular a mouse.

[0300] Embodiment 82. The method of embodiments 80 or 81, wherein the biopolymer scaffold is autologous with respect to the individual, preferably wherein the biopolymer scaffold is an autologous protein.

[0301] Embodiment 83. The method of any one of embodiments 80 to 82, wherein the individual is administered a vaccine or gene therapy composition comprising a viral vector prior to, concurrent with and/or subsequent to said administering of the pharmaceutical composition.

[0302] Embodiment 84. The method of any one of embodiments 80 to 83, wherein the individual is a non-human animal.

[0303] Embodiment 85. The method of any one of embodiments 80 to 82, wherein the individual is administered a vaccine or gene therapy composition comprising a viral vector and wherein the one or more antibodies present in the individual are specific for said viral vector, preferably wherein said administering of the vaccine or gene therapy composition is prior to, concurrent with and/or subsequent to said administering of the pharmaceutical composition.

[0304] Embodiment 86. The method of embodiment 85, wherein the viral vector contains genetic material.

[0305] Embodiment 87. The method of any one of embodiments 80 to 86, wherein the individual is healthy.

[0306] Embodiment 88. The method of any one of embodiments 80 to 87, wherein the composition is administered intraperitoneally, subcutaneously, intramuscularly or intravenously.

[0307] Embodiment 89. A vaccine or gene therapy composition, comprising the compound of any one of embodiments 1 to 64 and further comprising the viral vector (typically wherein the viral vector contains genetic material) and optionally at least one pharmaceutically acceptable excipient;
[0308] preferably wherein the viral vector comprises a peptide fragment with a sequence length of 6-13 amino acids, preferably 7-11 amino acids, more preferably 7-9 amino acids, and
[0309] wherein the sequence of at least one occurrence of peptide P, or peptide Pₐ and/or peptide P_{b}, of the compound is at least 70% identical, preferably at least 75% identical, more preferably at least 80% identical, yet more preferably at least 85% identical, even more preferably at least 90% identical, yet even more preferably at least 95% identical, especially completely identical to the sequence of said peptide fragment.

[0310] Embodiment 90. The vaccine or gene therapy composition of embodiment 89, wherein the viral vector is AdV or AAV.

[0311] Embodiment 91. The vaccine of embodiment 89 or 90, wherein the vaccine further comprises an adjuvant.

[0312] Embodiment 92. The gene therapy composition of any one of embodiments 89 to 90, wherein the composition is prepared for intravenous administration.

[0313] Embodiment 93. The pharmaceutical composition of any one of embodiments 89 to 92, wherein the composition is an aqueous solution.

[0314] Embodiment 94. The pharmaceutical composition of any one of embodiments 89 to 93 for use in inhibition of an immune reaction, preferably an antibody-mediated immune reaction, against the active agent.

[0315] Embodiment 95. The pharmaceutical composition for use according to embodiment 94, wherein the composition is non-immunogenic in the individual.

[0316] Embodiment 96. A method of inhibiting an immune reaction to a treatment with an active agent in an individual in need of treatment with the active agent, comprising
[0317] obtaining a pharmaceutical composition as defined in any one of embodiments 89 to 95; wherein the compound of the pharmaceutical composition is non-immunogenic in the individual, and
[0318] administering the pharmaceutical composition to the individual.

[0319] Embodiment 97. The method of embodiment 96, wherein the individual is human.

[0320] Embodiment 98. The method of embodiment 96 or 97, wherein the biopolymer scaffold is autologous with respect to the individual, preferably wherein the biopolymer scaffold is an autologous protein.

[0321] Embodiment 99. The method of any one of embodiments 96 to 98, wherein the composition is administered intraperitoneally, subcutaneously, intramuscularly or intravenously.

[0322] Embodiment 100. A peptide with a sequence length of 6 to 50 amino acids, more preferably 6 to 25 amino acids, even more preferably 6 to 20 amino acids, yet more preferably 6 to 13 amino acids, wherein the peptide comprises a sequence of at least 4 or at least 5 or at least 6, preferably at least 7, more preferably at least 8, even more preferably at least 9, yet even more preferably at least 10 consecutive amino acids selected from:
[0323] the group of AdV sequences ETGPPTVPFLTPPF (SEQ ID NO: 32), HDSKLSIATQGPL (SEQ ID NO: 33), LNLRLGQGPLFINSAHNLDINY (SEQ ID NO: 34), VDPMDEPTLLYVLFEVFDVV (SEQ ID NO: 35),
[0324] MKRARPSEDTFNPVYPYD (SEQ ID NO: 36), ISGTVQSAHLIIRFD (SEQ ID NO: 37), LGQGPLFINSAHNLDINYNKGLYLF (SEQ ID NO: 38), SYPFDAQNQLNLRLGQGPLFIN (SEQ ID NO: 39), GDTTPSAYSMSFSWDWSGHNYIN (SEQ ID NO: 40), VLLNNSFLDPEYWNFRN (SEQ ID NO: 41), HNYINEIFATSSYTFSYIA (SEQ ID NO: 42),
[0325] DEAATALEINLEEEDDDNEDEVDEQAEQQKTH (SEQ ID NO: 43), INLEEEDDDNEDEVDEQAEQ (SEQ ID NO: 44), DNEDEVDEQAEQQKTHVF (SEQ ID NO: 45), EWDEAATALEINLEE (SEQ ID NO: 46),
[0326] PKVVLYSEDVDIETPDTHISYMP (SEQ ID NO: 47), YIPESYKDRMYSFFRNF (SEQ ID NO: 48), DSIGDRTRYFSMW (SEQ ID NO: 49), SYKDRMYSFFRNF (SEQ ID NO: 50), and FLVQMLANYNIGYQGFY (SEQ ID NO: 51), or
[0327] the group of AAV sequences WQNRDVYLQGPIWAKIP (SEQ ID NO: 52), DNTYFGYSTPWGYFDFNRFHC (SEQ ID NO: 53), MANQAKNWLPGPCY (SEQ ID NO: 54), LPYVLGSAHQGCLPPFP (SEQ ID NO: 55), NGSQAVGRSSFYCLEYF (SEQ ID NO: 56), PLIDQYLYYL (SEQ ID NO: 57), EERFFPSNGILIF (SEQ ID NO: 58), ADGVGSSSGNWHC (SEQ ID NO: 59), SEQ ID NOs: 383-1891 (see Table 1) - preferably group III of Table 1, more preferably group II of Table 1, especially group I of Table 1 - and SEQ ID NOs: 1892-2063 (see Table 2) - preferably group I of Table 2 -and sequences of group II or III of Table 3 (in particular SEQ ID NOs: 2064-2103), more preferably sequences of group I of Table 3, or
[0328] the group of sequences of Table 4, in particular the group of sequences identified by SEQ ID NOs: 2104-2190,
[0329] optionally wherein at most three, preferably at most two, most preferably at least one amino acid of the sequence is independently substituted by any other amino acid;
[0330] preferably wherein the peptide is a peptide as defined in embodiment 31, 32 or 33.

[0331] Embodiment 101. A method for detecting and/or quantifying AdV- or AAV-neutralizing antibodies in a biological sample comprising the steps of
[0332] bringing the sample into contact with the peptide of embodiment 100, and
[0333] detecting the presence and/or concentration of the antibodies in the sample.

[0334] Embodiment 102. The method of embodiment 101, wherein the peptide is immobilized on a solid support, in particular a biosensor-based diagnostic device with an electrochemical, fluorescent, magnetic, electronic, gravimetric or optical biotransducer and/or wherein the peptide is coupled to a reporter or reporter fragment, such as a reporter fragment suitable for a PCA.

[0335] Embodiment 103. The method of embodiment 101 or 102, wherein the method is a sandwich assay, preferably an enzyme-linked immunosorbent assay (ELISA).

[0336] Embodiment 104. The method of any one of embodiments 101 to 103, wherein the sample is obtained from a mammal, preferably a human.

[0337] Embodiment 105. The method of any one of embodiment 101 to 104, wherein the sample is a blood sample, preferably whole blood, serum, or plasma.

[0338] Embodiment 106. Use of the peptide according to embodiment 100 in an enzyme-linked immunosorbent assay (ELISA), preferably for a method as defined in any one of embodiments 101 to 105.

[0339] Embodiment 107. Diagnostic device comprising the peptide according to embodiment 100 wherein the peptide is immobilized on a solid support and/or wherein the peptide is coupled to a reporter or reporter fragment, such as a reporter fragment suitable for a PCA.

[0340] Embodiment 108. Diagnostic device according to embodiment 107, wherein the solid support is an ELISA plate or a surface plasmon resonance chip.

[0341] Embodiment 109. Diagnostic device according to embodiment 107, wherein the diagnostic device is a lateral flow assay device or a biosensor-based diagnostic device with an electrochemical, fluorescent, magnetic, electronic, gravimetric or optical biotransducer.

[0342] Embodiment 110. A diagnostic kit comprising a peptide according to embodiment 100, preferably diagnostic device according to any one of embodiment 107 to 109, and preferably one or more selected from the group of a buffer, a reagent, instructions.

[0343] Embodiment 111. An apheresis device comprising the peptide according to embodiment 100, preferably immobilized on a solid carrier.

[0344] Embodiment 112. The apheresis device according to embodiment 111, wherein the solid carrier is capable of being contacted with blood or plasma flow.

[0345] Embodiment 113. The apheresis device according to embodiment 111 or 112, wherein the solid carrier comprises the compound according to any one of embodiments 1 to 64.

[0346] Embodiment 114. The apheresis device according to any one of embodiment 111 to 113, wherein the solid carrier is a sterile and pyrogen-free column.

[0347] Embodiment 115. The apheresis device according to any one of embodiments 111 to 114, wherein the apheresis device comprises at least two, preferably at least three, more preferably at least four different peptides according to embodiment 100.

[0348] The present invention is further illustrated by the following figures and examples, without being restricted thereto. In the context of the following figures and examples the compound on which the inventive approach is based is also referred to as “Selective Antibody Depletion Compound” (SADC).

[0349] FIG. 1: SADCs successfully reduce the titre of undesired antibodies. Each SADC was applied at time point 0 by i.p. injection into Balb/c mice pre-immunized by peptide immunization against a defined antigen. Each top panel shows anti-peptide titers (0.5x dilution steps; X-axis shows log(X) dilutions) against OD values (y-axis) according to a standard ELISA detecting the corresponding antibody. Each bottom panel shows titers LogIC50 (y-axis) before injection of each SADC (i.e. titers at -48 h and -24 h) and after application of each SADC (i.e. titers +24 h, +48 h and +72 h after injection; indicated on the x-axis). (A) Compound with albumin as the biopolymer scaffold that binds to antibodies directed against EBNA1 (associated with pre-eclampsia). The mice were pre-immunized with a peptide vaccine carrying the EBNA-1 model epitope. (B) Compound with albumin as the biopolymer scaffold that binds to antibodies directed against a peptide derived from the human AChR protein MIR (associated with myasthenia gravis). The mice were pre-immunized with a peptide vaccine carrying the AChR MIR model epitope. (C) Compound with immunoglobulin as the biopolymer scaffold that binds to antibodies directed against EBNA1 (associated with pre-eclampsia). The mice were pre-immunized with a peptide vaccine carrying the EBNA-1 model epitope. (D) Compound with haptoglobin as the biopolymer scaffold that binds to antibodies directed against EBNA1 (associated with pre-eclampsia). The mice were pre-immunized with a peptide vaccine carrying the EBNA-1 model epitope. (E) Demonstration of selectivity using the same immunoglobulin-based SADC binding to antibodies directed against EBNA1 that was used in the experiment shown in panel C. The mice were pre-immunized with an unrelated amino acid sequence. No titre reduction occurred, demonstrating selectivity of the compound.

[0350] FIG. 2: SADCs are non-immunogenic and do not induce antibody formation after repeated injection into mice. Animals C1-C4 as well as animals C5-C8 were treated i.p. with two different SADCs. Control animal C was vaccinated with a KLH-peptide derived from the human AChR protein MIR. Using BSA-conjugated peptide probes T3-1, T9-1 and E005 (grey bars, as indicated in the graph), respectively, for antibody titer detection by standard ELISA at a dilution of 1:100, it could be demonstrated that antibody induction was absent in animals treated with an SADC, when compared to the vaccine-treated control animal C (y-axis, OD450 nm).

[0351] FIG. 3: Successful in vitro depletion of antibodies using SADCs carrying multiple copies of monovalent or divalent peptides. SADCs with mono- or divalent peptides were very suitable to adsorb antibodies and thereby deplete them. “Monovalent” means that peptide monomers are bound to the biopolymer scaffold (i.e. n=1) whereas “divalent” means that peptide dimers are bound to the biopolymer scaffold (i.e. n=2). In the present case, the divalent peptides were “homodivalent”, i.e. the peptide n-mer of the SADC is E006 - spacer - E006).

[0352] FIG. 4: Rapid, selective antibody depletion in mice using various SADC biopolymer scaffolds. Treated groups exhibited rapid and pronounced antibody reduction already at 24 hrs (in particular SADC-TF) when compared to the mock treated control group SADC-CTL (containing an unrelated peptide). SADC with albumin scaffold - SADC-ALB, SADC with immunoglobulin scaffold -SADC-IG, SADC with haptoglobin scaffold - SADC-HP, and SADC with transferrin scaffold - SADC-TF.

[0353] FIG. 5: Detection of SADCs in plasma via their peptide moieties 24 hrs after SADC injection. Both haptoglobin-scaffold-based SADCs (SADC-HP and SADC-CTL) exhibited a relatively shorter plasma half life which represents an advantage over SADCs with other biopolymer scaffolds such as SADC-ALB, SADC-IG oder SADC-TF. SADC with albumin scaffold - SADC-ALB, SADC with immunoglobulin scaffold - SADC-IG, SADC with haptoglobin scaffold - SADC-HP, and SADC with transferrin scaffold - SADC-TF.

[0354] FIG. 6: Detection of SADC-IgG complexes in plasma 24 hrs after SADC injection. Haptoglobin based SADCs were subject to accelerated clearance when compared to SADCs with other biopolymer scaffolds. SADC with albumin scaffold - SADC-ALB, SADC with immunoglobulin scaffold - SADC-IG, SADC with haptoglobin scaffold - SADC-HP, and SADC with transferrin scaffold - SADC-TF.

[0355] FIG. 7: In vitro analysis of SADC-IgG complex formation. Animals SADC-TF and -ALB showed pronounced immunocomplex formation and binding to C1q as reflected by the strong signals and by sharp signal lowering in case 1000 ng/ml SADC-TF due to the transition from antigen-antibody equilibrium to antigen excess. In contrast, in vitro immunocomplex formation with SADC-HP or SADC-IG were much less efficient when measured in the present assay. These findings corroborate the finding that haptoglobin scaffolds are advantageous over other SADC biopolymer scaffolds because of the reduced propensity to activate the complement system. SADC with albumin scaffold - SADC-ALB, SADC with immunoglobulin scaffold - SADC-IG, SADC with haptoglobin scaffold - SADC-HP, and SADC with transferrin scaffold - SADC-TF.

[0356] FIG. 8: Determination of IgG capturing by SADCs in vitro. SADC-HP showed markedly less antibody binding capacity in vitro when compared to SADC-TF or SADC-ALB. SADC with albumin scaffold -SADC-ALB, SADC with immunoglobulin scaffold - SADC-IG, SADC with haptoglobin scaffold - SADC-HP, and SADC with transferrin scaffold - SADC-TF.

[0357] FIG. 9: Blood clearance of an anti-CD163-antibody-based biopolymer scaffold. In a mouse model, mAb E10B10 (specific for murine CD163) is much more rapidly cleared from circulation than mAb Mac2-158 (specific for human CD163 but not for murine CD163, thus serving as negative control in this experiment).

[0358] FIG. 10: AdV capsid protein sequences for use in the present invention. Databases accession numbers (in particular UniProt or GenBank accession numbers) are listed.

[0359] FIG. 11: AAV capsid protein sequences for use in the present invention. Databases accession numbers (in particular UniProt or GenBank accession numbers are listed), as well as references to sequences in patent publications.

### EXAMPLES

[0360] Examples 1-3, 5-8 and 11-13 demonstrate that SADCs are very well suited for selective removal of undesirable antibodies. Examples 4, 10 and 14-21 contain more details on the inventive compounds with respect to antibodies against viral vectors and corresponding peptide epitopes.

### Example 1: SADCs Effectively Reduce the Titre of Undesired Antibodies.

[0361] Animal models: In order to provide in vivo models with measurable titers of prototypic undesired antibodies in human indications, BALB/c mice were immunized using standard experimental vaccination with KLH-conjugated peptide vaccines derived from established human autoantigens or anti-drug antibodies. After titer evaluation by standard peptide ELISA, immunized animals were treated with the corresponding test SADCs to demonstrate selective antibody lowering by SADC treatment. All experiments were performed in compliance with the guidelines by the corresponding animal ethics authorities.

[0362] Immunization of mice with model antigens: Female BALB/c mice (aged 8-10 weeks) were supplied by Janvier (France), maintained under a 12 h light/12 h dark cycle and given free access to food and water. Immunizations were performed by s.c. application of KLH carrier-conjugated peptide vaccines injected 3 times in biweekly intervals. KLH conjugates were generated with peptide T3-2 (SEQ ID NO. 356: CGRPQKRPSCIGCKG), which represents an example for molecular mimicry between a viral antigen (EBNA-1) and an endogenous human receptor antigen, namely the placental GPR50 protein, that was shown to be relevant to preeclampsia (Elliott et al.). In order to confirm the generality of this approach, a larger antigenic peptide derived from the autoimmune condition myasthenia gravis was used for immunization of mice with a human autoepitope. In analogy to peptide T3-2, animals were immunized with peptide T1-1 (SEQ ID NO. 357: LKWNPDDYGGVKKIHIPSEKGC), derived from the MIR (main immunogenic region) of the human AChR protein which plays a fundamental role in pathogenesis of the disease (Luo et al.). The T1-1 peptide was used for immunizing mice with a surrogate partial model epitope of the human AChR autoantigen. The peptide T8-1 (SEQ ID NO. 358: DHTLYTPYHTHPG) was used to immunize control mice to provide a control titer for proof of selectivity of the system. For vaccine conjugate preparation, KLH carrier (Sigma) was activated with sulfo-GMBS (Cat. Nr. 22324 Thermo), according to the manufacturer’s instructions, followed by addition of either N- or C-terminally cysteinylated peptides T3-2 and T1-1 and final addition of Alhydrogel^{®} before injection into the flank of the animals. The doses for vaccines T3-2 and T1-1 were 15 µg of conjugate in a volume of 100 ul per injection containing Alhydrogel^{®} (InvivoGen VAC-Alu-250) at a final concentration of 1% per dose.

[0363] Generation of prototypic SADCs: For testing selective antibody lowering activity by SADCs of T3-2 and T1-1 immunized mice, SADCs were prepared with mouse serum albumin (MSA) or mouse immunoglobulin (mouse-Ig) as biopolymer scaffold in order to provide an autologous biopolymer scaffold, that will not induce any immune reaction in mice, or non-autologuous human haptoglobin as biopolymer scaffold (that did not induce an allogenic reaction after one-time injection within 72 hours). N-terminally cysteinylated SADC peptide E049 (SEQ ID NO. 359: GRPQKRPSCIG) and/or C-terminally cysteinylated SADC peptide E006 (SEQ ID NO. 360: VKKIHIPSEKG) were linked to the scaffold using sulfo-GMBS (Cat. Nr. 22324 Thermo)-activated MSA (Sigma; Cat. Nr. A3559) or -mouse-Ig (Sigma, I5381) or -human haptoglobin (Sigma H0138) according to the instructions of the manufacturer, thereby providing MSA-, Ig- and haptoglobin-based SADCs with the corresponding cysteinylated peptides, that were covalently attached to the lysines of the corresponding biopolymer scaffold. Beside conjugation of the cysteinylated peptides to the lysines via a bifunctional amine-to-sulfhydryl crosslinker, a portion of the added cysteinylated SADC peptides directly reacted with sulfhydryl groups of cysteins of the albumin scaffold protein, which can be detected by treating the conjugates with DTT followed by subsequent detection of free peptides using mass spectrometry or any other analytical method that detects free peptide. Finally, these SADC conjugates were dialysed against water using Pur-A-Lyzer™ (Sigma) and subsequently lyophilized. The lyophilized material was resuspended in PBS before injection into animals.

[0364] In vivo functional testing of SADCs: Prototypic SADCs, SADC-E049 and SADC-E006 were injected intraperitoneally (i.p.; as a surrogate for an intended intravenous application in humans and larger animals) into the mice that had previously been immunized with peptide vaccine T3-2 (carrying the EBNA-1 model epitope) and peptide vaccine T1-1 (carrying the AChR MIR model epitope). The applied dose was 30 µg SADC conjugate in a volume of 50 µl PBS. Blood takes were performed by submandibular vein puncture, before (-48 h, -24 h) and after (+24 h,+48 h,+72 h, etc.) i.p. SADC injections, respectively, using capillary micro-hematocrit tubes. Using ELISA analysis (see below), it was found that both prototypic SADCs were able to clearly reduce the titers over a period of at least 72 hrs in the present animal model. It could therefore be concluded that SADCs can be used to effectively reduce titers in vivo.

[0365] Titer analysis: Peptide ELISAs were performed according to standard procedures using 96-well plates (Nunc Medisorp plates; Thermofisher, Cat Nr 467320) coated for 1 h at RT with BSA-coupled peptides (30 nM, dissolved in PBS) and incubated with the appropriate buffers while shaking (blocking buffer, 1% BSA, 1x PBS; washing buffer, 1xPBS / 0,1% Tween; dilution buffer, 1xPBS / 0.1% BSA /0,1% Tween). After serum incubation (dilutions starting at 1:50 in PBS; typically in 1:3 or 1:2 titration steps), bound antibodies were detected using Horseradish Peroxidase-conjugated goat anti-mouse IgG (Fc) from Jackson immunoresearch (115-035-008). After stopping the reaction, plates were measured at 450 nm for 20 min using TMB. EC50 were calculated from readout values using curve fitting with a 4-parameter logistic regression model (GraphPad Prism) according to the procedures recommended by the manufacturer. Constraining parameters for ceiling and floor values were set accordingly, providing curve fitting quality levels of R² >0.98.

[0366] FIG. 1A shows an in vivo proof of concept in a mouse model for in vivo selective plasma-lowering activity of a prototypic albumin-based SADC candidate that binds to antibodies directed against EBNA1, as a model for autoantibodies and mimicry in preeclampsia (Elliott et al.). For these mouse experiments, mouse albumin was used, in order to avoid any reactivity against a protein from a foreign species. Antibody titers were induced in 6 months old Balb/c mice by standard peptide vaccination. The bottom panel demonstrates that titers LogIC50 (y-axis) before SADC injection (i.e. titers at -48 h and -24 h) were higher than titers LogIC50 after SADC application (i.e. titers +24 h, +48 h and +72 h after injection; indicated on the x-axis).

[0367] A similar example is shown in FIG. 1B, using an alternative example of a peptidic antibody binding moiety for a different disease indication. Antibody lowering activity of an albumin-based SADC in a mouse model that was pre-immunized with a different peptide derived from the human AChR protein MIR region (Luo et al.) in order to mimic the situation in myasthenia gravis. The induced antibody titers against the AChR-MIR region were used as surrogate for anti-AChR-MIR autoantibodies known to play a causative role in myasthenia gravis (reviewed by Vincent et al.). A clear titer reduction was seen after SADC application.

[0368] FIGS. 1C and 1D demonstrate the functionality of SADC variants comprising alternative biopolymer scaffolds. Specifically, FIG. 1C shows that an immunoglobulin scaffold can be successfully used whereas FIG. 1D demonstrates the use of a haptoglobin-scaffold for constructing an SADC. Both examples show an in vivo proof of concept for selective antibody lowering by an SADC, carrying covalently bound example peptide E049.

[0369] The haptoglobin-based SADC was generated using human Haptoglobin as a surrogate although the autologuous scaffold protein would be preferred. In order to avoid formation of antihuman-haptoglobin antibodies, only one single SADC injection per mouse of the non-autologuous scaffold haptoglobin was used for the present experimental conditions. As expected, under the present experimental conditions (i.e. one-time application), no antibody reactivity was observed against the present surrogate haptoglobin homologue.

[0370] FIG. 1E demonstrates the selectivity of the SADC system. The immunoglobulin-based SADC carrying the peptide E049 (i.e. the same as in FIG. 1C) cannot reduce the Ig-titer that was induced by a peptide vaccine with an unrelated, irrelevant amino acid sequence, designated peptide T8-1 (SEQ ID NO. 358: DHTLYTPYHTHPG). The example shows an in vivo proof of concept for the selectivity of the system. The top panel shows anti-peptide T8-1 titers (0,5x dilution steps starting from 1:50 to 1:102400; X-axis shows log(X) dilutions) against OD values (y-axis) according to a standard ELISA. T8-1-titers are unaffected by administration of SADC-Ig-E049 after application. The bottom panel demonstrates that the initial titers LogIC50 (y-axis) before SADC injection (i.e. titers at -48 h and -24 h) are unaffected by administration of SADC-Ig-E049 (arrow) when compared to the titers LogIC50 after SADC application (i.e. titers +24 h, +48 h and +72 h; as indicated on the x-axis), thereby demonstrating the selectivity of the system.

### Example 2: Immunogenicity of SADCs

[0371] In order to exclude immunogenicity of SADCs, prototypic candidate SADCs were tested for their propensity to induce antibodies upon repeated injection. Peptides T3-1 and T9-1 were used for this test. T3-1 is a 10-amino acid peptide derived from a reference epitope of the Angiotensin receptor, against which agonistic autoantibodies are formed in a pre-eclampsia animal model (Zhou et al.); T9-1 is a 12-amino acid peptide derived from a reference anti-drug antibody epitope of human IFN gamma (Lin et al.). These control SADC conjugates were injected 8 x every two weeks i.p. into naive, non-immunized female BALB/c mice starting at an age of 8-10 weeks.

[0372] Animals C1-C4 were treated i.p. (as described in example 1) with SADC T3-1. Animals C5-C8 were treated i.p. with an SADC carrying the peptide T9-1. As a reference signal for ELISA analysis, plasma from a control animal that was vaccinated 3 times with KLH-peptide T1-1 (derived from the AChR-MIR, explained in Example 1) was used. Using BSA-conjugated peptide probes T3-1, T9-1 and E005 (SEQ ID NO. 361: GGVKKIHIPSEK), respectively, for antibody titer detection by standard ELISA at a dilution of 1:100, it could be demonstrated that antibody induction was absent in SADC-treated animals, when compared to the vaccine-treated control animal C (see FIG. 2). The plasmas were obtained by submandibular blood collection, 1 week after the 3rd vaccine injection (control animal C) and after the last of 8 consecutive SADC injections in 2-weeks intervals (animals C1-C8), respectively. Thus it was demonstrated that SADCs are non-immunogenic and do not induce antibody formation after repeated injection into mice.

### Example 3: Successful In Vitro Depletion of Antibodies Using SADCs Carrying Multiple Copies of Monovalent or Divalent Peptides.

[0373] Plasma of E006-KLH (VKKIHIPSEKG (SEQ ID NO: 360) with C-terminal cysteine, conjugated to KLH) vaccinated mice was diluted 1:3200 in dilution buffer (PBS + 0.1% w/v BSA + 0.1% Tween20) and incubated (100 µl, room temperature) sequentially (10 min/well) four times on single wells of a microtiter plate that was coated with 2.5 µg/ml (250 ng/well) of SADC or 5 µg/ml (500 ng/well) albumin as negative control.

[0374] In order to determine the amount of free, unbound antibody present before and after incubation on SADC coated wells, 50 µl of the diluted serum were taken before and after the depletion and quantified by standard ELISA using E006-BSA coated plates (10 nM peptide) and detection by goat anti mouse IgG bio (Southern Biotech, diluted 1:2000). Subsequently, the biotinylated antibody was detected with Streptavidin-HRP (Thermo Scientific, diluted 1:5000) using TMB as substrate. Development of the signal was stopped with 0.5 M sulfuric acid.

[0375] ELISA was measured at OD450nm (y-axis). As a result, the antibody was efficiently adsorbed by either coated mono- or divalent SADCs containing peptide E006 with C-terminal cysteine (sequence VKKIHIPSEKGC, SEQ ID NO: 362) (before=non-depleted starting material; mono- divalent corresponds to peptides displayed on the SADC surface; neg. control was albumin; indicated on the x-axis). See FIG. 3. (“Monovalent” means that peptide monomers are bound to the biopolymer scaffold (i.e. n=1) whereas “divalent” means that peptide dimers are bound to the biopolymer scaffold (i.e. n=2). In the present case, the divalent peptides were “homodivalent”, i.e. the peptide n-mer of the SADC is E006 - S - E006.)

[0376] This demonstrates that SADCs with mono- or divalent peptides are very suitable to adsorb antibodies and thereby deplete them.

### Example 4: Generation of Mimotope-Based SADCs

[0377] mAb 4D2 is a mouse IgG2a mAb targeting the adenovirus fiber epitope peptide (NCBI Reference Sequence: AP_000226.1). It represents a prototype neutralizing antibody that was generated from UV irradiated Ad2 virus (Krasnykh et al, 1998).

[0378] Linear and circular peptides derived from wild-type or modified peptide amino acid sequences can be used for the construction of specific SADCs for the selective removal of neutralizing antibodies against viral vectors. In case of a particular epitope, linear peptides or constrained peptides such as cyclopeptides containing portions of an epitope or variants thereof, where for example, one or several amino acids have been substituted or chemically modified in order to improve affinity to an antibody (mimotopes), can be used for constructing SADCs. A peptide screen can be performed with the aim of identifying peptides with optimized affinity to neutralizing antibodies. The flexibility of structural or chemical peptide modification provided a solution to minimize the risk of immunogenicity, in particular of binding of the peptide to HLA and thus the risk of unwanted immune stimulation.

[0379] Therefore, wild-type as well as modified linear and circular peptide sequences are derived from an epitope of a viral capsid protein as disclosed herein, e.g. the epitopic sequence LNLRLGQGPLFINSAHNLDINY (SEQ ID NO: 34) of mAb 4D2 found in the course of the present invention (see example further below). Peptides of various length and positions are systematically permutated by amino acid substitutions and synthesized on a peptide array. This allows screening of 60000 circular and linear wild-type and mimotope peptides derived from these sequences. The peptide arrays are incubated with mAb 4D2. This antibody is therefore used to screen the 60000 peptides and 100 circular and 100 linear peptide hits are selected based on their relative binding strength to the antibody. Of these 200 peptides, 51 sequences are identical between the circular and the linear peptide group. All of the best peptides identified have at least one amino acid substitution when aligned to the original sequences, respectively and are therefore regarded as mimotopes. Also, higher binding strengths can be achieved with circularized peptides.

[0380] These newly identified peptides, preferentially those with high relative binding values, are used to generate SADCs for increasing efficacy of AdV-based vector vaccines.

### Example 5: Rapid, Selective Antibody Depletion in Mice Using Various SADC Biopolymer Scaffolds.

[0381] 10 µg of model undesired antibody mAb anti V5 (Thermo Scientific) was injected i.p. into female Balb/c mice (5 animals per treatment group; aged 9-11 weeks) followed by intravenous injection of 50 µg SADC (different biopolymer scaffolds with tagged V5 peptides bound, see below) 48 hrs after the initial antibody administration. Blood was collected at 24 hrs intervals from the submandibular vein. Blood samples for time point 0 hrs were taken just before SADC administration.

[0382] Blood was collected every 24 hrs until time point 120 hrs after the SADC administration (x-axis). The decay and reduction of plasma anti-V5 IgG levels after SADC administration was determined by anti V5 titer readout using standard ELISA procedures in combination with coated V5-peptide-BSA (peptide sequence IPNPLLGLDC - SEQ ID NO: 561) and detection by goat anti mouse IgG bio (Southern Biotech, diluted 1:2000) as shown in FIG. 4. In addition, SADC levels (see Example 6) and immunocomplex formation (see Example 7) were analyzed.

[0383] EC50[OD450] values were determined using 4 parameter logistic curve fitting and relative signal decay between the initial level (set to 1 at time point 0) and the following time points (x-axis) was calculated as ratio of the EC50 values (y-axis, fold signal reduction EC50). All SADC peptides contained tags for direct detection of SADC and immunocomplexes from plasma samples; peptide sequences used for SADCs were: IPNPLLGLDGGSGDYKDDDDKGK(SEQ ID NO: 363)-(BiotinAca)GC (SADC with albumin scaffold - SADC-ALB, SADC with immunoglobulin scaffold -SADC-IG, SADC with haptoglobin scaffold - SADC-HP, and SADC with transferrin scaffold - SADC-TF) and unrelated peptide VKKIHIPSEKGGSGDYKDDDDKGK(SEQ ID NO: 364)-(BiotinAca)GC as negative control SADC (SADC-CTR).

[0384] The SADC scaffolds for the different treatment groups of 5 animals are displayed in black/grey shades (see inset of FIG. 4).

[0385] Treated groups exhibited rapid and pronounced anibody reduction already at 24 hrs (in particular SADC-TF) when compared to the mock treated control group SADC-CTL. SADC-CTR was used as reference for a normal antibody decay since it has no antibody lowering activity because its peptide sequence is not recognized by the administered anti V5 antibody. The decay of SADC-CTR is thus marked with a trend line, emphasizing the antibody level differences between treated and mock treated animals.

[0386] In order to determine the effectivity of selective antibody lowering under these experimental conditions, a two-way ANOVA test was performed using a Dunnett’s multiple comparison test. 48 hrs after SADC administration, the antibody EC50 was highly significantly reduced in all SADC groups (p<0.0001) compared to the SADC-CTR reference group (trend line). At 120 hrs after SADC administration, antibody decrease was highly significant in the SADC-ALB and SADC-TF groups (both p<0.0001) and significant in the SADC-HP group (p=0.0292), whereas the SADC-IG group showed a trend towards an EC50 reduction(p = 0.0722) 120 hrs after SADC administration. Of note, selective antibody reduction was highly significant (p<0.0001) in the SADC-ALB and SADC-TF groups at all tested time-points after SADC administration.

[0387] It is concluded that all SADC biopolymer scaffolds were able to selectively reduce antibody levels. Titer reduction was most pronounced with SADC-ALB and SADC-TF and no rebound or recycling of antibody levels was detected towards the last time points suggesting that undesired antibodies are degraded as intended.

### Example 6: Detection of SADCs in Plasma 24 hrs after SADC Injection.

[0388] Plasma levels of different SADC variants at 24 hrs after i.v. injection into Balb/c mice. Determination of Plasma levels (y-axis) of SADC-ALB, -IG, -HP, -TF and the negative control SADC-CTR (x-axis), were detected in the plasmas from the animals already described in example 5. Injected plasma SADC levels were detected by standard ELISA whereby SADCs were captured via their biotin moieties of their peptides in combination with streptavidin coated plates (Thermo Scientific). Captured SADCs were detected by mouse anti Flag-HRP antibody (Thermo Scientific, 1:2,000 diluted) detecting the Flag-tagged peptides (see also example 7):

[0389] Assuming a theoretical amount in the order of 25 µg/ml in blood after injecting 50 µg SADC i.v., the detectable amount of SADC ranged between 799 and 623 ng/ml for SADC-ALB or SADC-IG and up to approximately 5000 ng/ml for SADC-TF, 24 hrs after SADC injection. However surprisingly and in contrast, SADC-HP and control SADC-CTR (which is also a SADC-HP variant, however carrying the in this case unrelated negative control peptide E006, see previous examples), had completely disappeared from circulation 24 hrs after injection, and were not detectable anymore. See FIG. 5.

[0390] This demonstrates that both Haptoglobin scaffold-based SADCs tested in the present example ((namely SADC-HP and SADC-CTR) exhibit a relatively shorter plasma half-life which represents an advantage over SADCs such as SADC-ALB, SADC-IG oder SADC-TF in regard of their potential role in complement-dependent vascular and renal damage due to the in vivo risk of immunocomplex formation. Another advantage of SADC-HP is the accelerated clearance rate of their unwanted target antibody from blood in cases where a rapid therapeutic effect is needed. The present results demonstrate that Haptoglobin-based SADC scaffolds (as represented by SADC-HP and SADC-CTR) are subject to rapid clearance from the blood, regardless of whether SADC-binding antibodies are present in the blood, thereby minimizing undesirable immunocomplex formation and showing rapid and efficient clearance. Haptoglobin-based SADCs such as SADC-HP in the present example thus provide a therapeutically relevant advantage over other SADC biopolymer scaffolds, such as demonstrated by SADC-TF or SADC-ALB, both of which are still detectable 24 hrs after injection under the described conditions, in contrast to SADC-HP or SADC-CTR which both are completely cleared 24 hrs after injection.

### Example 7: Detection of SADC-IgG Complexes in Plasma 24 hrs After SADC Injection.

[0391] In order to determine the amount IgG bound to SADCs in vivo, after i.v. injection of 10 µg anti V5 IgG (Thermo Scientific) followed by injection of SADC-ALB, -HP, -TF and -CTR (50 µg) administered i.v. 48 h after antibody injection, plasma was collected from the submandibular vein, 24 hrs after SADC injection, and incubated on streptavidin plates for capturing SADCs from plasma via their biotinylated SADC-V5-peptide [IPNPLLGLDGGSGDYKDDDDKGK(SEQ ID NO: 363) (BiotinAca)GC or in case of SADC-CTR the negative control peptide VKKIHIPSEKGGSGDYKDDDDKGK(SEQ ID NO: 364) (BiotinAca)GC]. IgG bound to the streptavidin-captured SADCs was detected by ELISA using a goat anti mouse IgG HRP antibody (Jackson Immuno Research, diluted 1:2,000) for detection of the SADC-antibody complexes present in plasma 24 hrs after SADC injection. OD450nm values (y-axis) obtained for a negative control serum from untreated animals were subtracted from the OD450nm values of the test groups (x-axis) for background correction.

[0392] As shown in FIG. 6, pronounced anti-V5 antibody signals were seen in case of SADC-ALB and SADC-TF injected mice (black bars represent background corrected OD values at a dilution of 1:25, mean value of 5 mice; standard deviation error bars), whereas no antibody signal could be detected in plasmas from SADC-HP or control SADC-CTR injected animals (SADC-CTR is a negative control carrying the irrelevant peptide bio-FLG-E006 [VKKIHIPSEKGGSGDYKDDDDKGK(SEQ ID NO: 364) (BiotinAca)GC] that is not recognized by any anti V5 antibody). This demonstrates the absence of detectable amounts of SADC-HP/IgG complexes in the plasma 24 hrs after i.v. SADC application.

[0393] SADC-HP is therefore subject to accelerated clearance in anti V5 pre-injected mice when compared to SADC-ALB or SADC-TF.

### Example 8: In Vitro Analysis of SADC-Immunoglobulin Complex Formation

[0394] SADC-antibody complex formation was analyzed by preincubating 1 µg/ml of human anti V5 antibody (anti V5 epitope tag [SV5-P-K], human IgG3, Absolute Antibody) with increasing concentrations of SADC-ALB, -IG, -HP, -TF and -CTR (displayed on the x-axis) in PBS +0.1% w/v BSA + 0.1% v/v Tween20 for 2 hours at room temperature in order to allow for immunocomplex formation in vitro. After complex formation, samples were incubated on ELISA plates that had previously been coated with 10 µg/ml of human C1q (CompTech) for 1 h at room temperature, in order to allow capturing of in vitro formed immunocomplexes. Complexes were subsequently detected by ELISA using anti human IgG (Fab specific)-Peroxidase (Sigma, diluted 1:1,000). Measured signals at OD450 nm (y-axis) reflect Antibody-SADC complex formation in vitro.

[0395] As shown in FIG. 7, SADC-TF and -ALB showed pronounced immunocomplex formation and binding to C1q as reflected by the strong signals and by sharp signal lowering in case 1000 ng/ml SADC-TF due to the transition from antigen-antibody equilibrium to antigen excess. In contrast, in vitro immunocomplex formation with SADC-HP or SADC-IG were much less efficient when measured in the present assay.

[0396] Together with the in vivo data (previous examples), these findings corroborate the finding that haptoglobin scaffolds are advantageous over other SADC biopolymer scaffolds because of the reduced propensity to activate the complement system. In contrast, SADC-TF or SADC-ALB show higher complexation, and thereby carry a certain risk of activating the C1 complex with initiation of the classical complement pathway (a risk which may be tolerable in some settings, however).

### Example 9: Determination of IgG Capturing by SADCs In Vitro

[0397] Immunocomplexes were allowed to form in vitro, similar to the previous example, using 1 µg/ml mouse anti V5 antibody (Thermo Scientific) in combination with increasing amounts of SADCs (displayed on the x-axis). SADC-antibody complexes were captured on a streptavidin coated ELISA plate via the biotinylated SADC-peptides (see previous examples), followed by detection of bound anti-V5 using anti mouse IgG-HRP (Jackson Immuno Research, diluted 1:2,000).

[0398] Under these assay conditions, SADC-HP showed markedly less antibody binding capacity in vitro when compared to SADC-TF or SADC-ALB (see FIG. 8, A). The calculated EC50 values for IgG detection on SADCs were 7.0 ng/ml, 27.9 ng/ml and 55.5 ng/ml for SADC-TF, -ALB and -HP, respectively (see FIG. 8, B).

[0399] This in vitro finding is consistent with the observation (see previous examples) that SADC-HP has a lower immunocomplex formation capacity when compared to SADC-TF or SADC-ALB which is regarded as a safety advantage with respect to its therapeutic use for the depletion of unwanted antibodies.

### Example 10: SADCs to Reduce Undesired Antibodies Against AAV-8

[0400] Three SADCs are provided to reduce AAV-8-neutralizing antibodies which hamper gene therapy (see Gurda et al. for the epitopes used; see also AAV-8 capsid protein sequence UniProt Q8JQF8, sequence version 1):
[0401] (a) SADC-a with Mac2-158 (as disclosed in WO 2011/039510 A2) as biopolymer scaffold and at least two peptides with the sequence YLQGPIW (SEQ ID NO: 312) covalently bound to the scaffold,
[0402] (b) SADC-b with human transferrin as biopolymer scaffold and at least two peptides with the sequence YFGYSTPWGYFDF (SEQ ID NO: 320) covalently bound to the scaffold, and
[0403] (c) SADC-c with human albumin as biopolymer scaffold and at least two peptides with the sequence QGCLPPF (SEQ ID NO: 335) covalently bound to the scaffold.
These SADCs are administered to an individual who will undergo gene therapy with AAV-8 as vector in order to increase efficiency of the gene therapy.

### Example 11: In-Vivo Function of Anti-CD163-Antibody-Based SADC Biopolymer Scaffold

[0404] Rapid in vivo blood clearance of anti-mouse-CD163 mAb E10B10 (as disclosed in WO 2011/039510 A2). mAb E10B10 was resynthesized with a mouse IgG2a backbone. 50 µg mAb E10B10 and Mac2-158 (human-specific anti-CD163 mAb as disclosed in WO 2011/039510 A2, used as negative control in this example since it does not bind to mouse CD163) were injected i.v. into mice and measured after 12, 24, 36, 48, 72, 96 hours in an ELISA to determine the blood clearance.

[0405] mAb E10B10 was much more rapidly cleared from circulation than control mAb Mac2-158 was, as shown in FIG. 9, since E10B10 binds to the mouse CD163 whereas Mac2-158 is human-specific, although both were expressed as mouse IgG2a isotypes for direct comparison.

[0406] In conclusion, anti-CD163 antibodies are highly suitable as SADC scaffold because of their clearance profile. SADCs with such scaffolds will rapidly clear undesirable antibodies from circulation.

[0407] Detailed methods: 50 ug of biotinylated monoclonal antibodies E10B10 and biotinylated Mac2-158 were injected i.v. into mice and measured after 12, 24, 36, 48, 72, 96 hours to determine the clearance by ELISA: Streptavidin plates were incubated with plasma samples diluted in PBS + 0.1%BSA + 0.1% Tween20 for 1 h at room temperature (50 µl/well). After washing (3x with PBS + 0.1% Tween20), bound biotinylated antibodies were detected with anti-mouse IgG+IgM-HRP antibody at a 1:1000 dilution. After washing, TMB substrate was added and development of the substrate was stopped with TMB Stop Solution. The signal at OD450 nm was read. The EC50 values were calculated by nonlinear regression using 4 parametric curve fitting with constrained curves and least squares regression. EC50 values at time-point T12 (this was the first measured time-point after antibody injection) was set at 100%, all other EC50 values were compared to the levels at T12.

### Example 12: Epitope Mapping of Anti-CD163 mAbs

[0408] mAb E10B10 provides CD163-mediated, accelerated in vivo clearance from blood in mice (see example 11). The epitope of this antibody was fine mapped using circular peptide arrays, whereby the peptides were derived from mouse CD163. As a result, a peptide cluster that is recognized by mAb E10B10 was identified (see example 13).

[0409] The same epitope mapping procedure using circularized peptides was performed with mAb Mac2-158 (as disclosed in WO 2011/039510 A2). Epitope mapping results for mAb Mac2-158 yielded two peptide clusters (see example 13) which allowed further demarcation of CD163 epitope regions that are especially relevant to internalization of ligands and antibodies that bind to the receptor.

[0410] These newly characterized epitopes for Mac2-158 and E10B10 thus revealed three preferred binding regions for antibodies against CD163. Based on the fine epitope mapping work, linear or preferentially circular peptides are synthesized and used for the induction, production and selection of polyclonal or monoclonal antibodies or other CD163-binding SADC scaffolds that target CD163.

### Example 13: Epitope Mapping of Anti-CD163 mAbs

[0411] Peptides aligned to SRCR domain 1 of human CD163 were selected from the top 20 peptide hits of mAb Mac2-158 circular epitope mapping peptides and the most preferred sequences were selected from two peptide alignment clusters at the N-terminus and at the C-terminus of SRCR-1 of human CD163. As a result, the following sequences (as well as motifs derived therefrom) are highly suitable epitopes anti-CD163 antibodies and fragments thereof used as SADC biopolymer scaffold:

Peptide cluster 1:

| | | |
|---|---|---|
| 04 | ----------------EWGTVCNNGWSME------- | (SEQ ID NO: 7) |
| 07 | -----CSGRVEVKVQEEW------------------ | (SEQ ID NO: 365) |
| 09 | --------------QEEWGTVCNNGWS--------- | (SEQ ID NO: 8) |
| 12 | -----------------WGTVCNNGWSMEA------ | (SEQ ID NO: 9) |
| 14 | ---------------EEWGTVCNNGWSM-------- | (SEQ ID NO: 10) |
| 18 | -------------VQEEWGTVCNNGW---------- | (SEQ ID NO: 11) |
| 19 | ----------------EWGTVCNNGW---------- | (SEQ ID NO: 12) |
| 20 | -----------------WGTVCNNGWS--------- | (SEQ ID NO: 5) |
| huCD163-domain 1-3 | DGENKCSGRVEVKVQEEWGTVCNNGWSMEAVSVICN | (SEQ ID NO: 366) |

Peptide cluster 2:

| | | |
|---|---|---|
| 01 | ------------ESALWDC-------------- | (SEQ ID NO: 15) |
| 02 | ---------RGNESALWDC-------------- | (SEQ ID NO: 16) |
| 03 | -------SCRGNESALW---------------- | (SEQ ID NO: 17) |
| 05 | ------VSCRGNESALWDC-------------- | (SEQ ID NO: 18) |
| 06 | --------------ALWDCKHDGW--------- | (SEQ ID NO. 19) |
| 08 | ----DHVSCRGNESALW---------------- | (SEQ ID NO. 20) |
| 11 | --------CRGNESALWD--------------- | (SEQ ID NO. 21) |
| 13 | -----------NESALWDCKHDGW--------- | (SEQ ID NO. 22) |
| 17 | ------------ESALWDCKHDGWG-------- | (SEQ ID NO. 23) |
| huCD163-domain1-3 | RIWMDHVSCRGNESALWDCKHDGWGKHSNCTHQ | (SEQ ID NO: 367) |

[0412] Fine epitope mapping of mAb E10B10 was performed as for Mac2-158. 1068 circular peptides (sized 7, 10 and 13 amino acids) and derived from SRCR-1 to -3 of the mouse CD163 sequence (UniProKB Q2VLH6.2) were screened with mAb E10B10 and the following top binding peptides were obtained (ranked by relative signal strength). The human CD163 sequence was aligned to this cluster of mouse CD163 sequences, revealing another highly suitable epitope:

Peptide cluster 3:

| | | | |
|---|---|---|---|
| 01 | ---------------------VTNAPGEMKKELR--------- | | (SEQ ID NO: 368) |
| 02 | ------------------ASAVTNAPGEMKK------------ | | (SEQ ID NO: 369) |
| 03 | ---------------------VTNAPGEMKK------------ | | (SEQ ID NO: 370) |
| 04 | ---------------------VTNAPGE--------------- | | (SEQ ID NO: 371) |
| 05 | ----------------GSASAVTNAPGEM-------------- | | (SEQ ID NO: 372) |
| 06 | --------------------AVTNAPGEMKKEL---------- | | (SEQ ID NO: 373) |
| 07 | -----------------SASAVTNAPGEMK------------- | | (SEQ ID NO: 374) |
| 08 | ---------------SGSASAVTNAPGE--------------- | | (SEQ ID NO: 375) |
| 09 | --------------------AVTNAPGEMK------------- | | (SEQ ID NO: 376) |
| 10 | -------------------SAVTNAPGEM-------------- | | (SEQ ID NO: 377) |
| 11 | ------------------ASAVTNAPGE--------------- | | (SEQ ID NO: 378) |
| 12 | -------------------SAVTNAPGEMKKE----------- | | (SEQ ID NO: 379) |
| 13 | ----------------------TNAPGEMKKE----------- | | (SEQ ID NO: 380) |
| mCD163(SRCR-1, N-terminus) | | VTNAPGEMKKELRLAGGENNCS | (SEQ ID NO: 75) |
| hCD163(SRCR-1, N-terminus) | | SSLGGTDKELRLVDGENKCS | (SEQ ID NO: 24) |

[0413] The human homologues of mouse peptides 01 - 13 from cluster 3 have the following sequences of the N-terminal portion of the mature human CD163 protein (UniProtKB: Q86VB7):

| | | |
|---|---|---|
| Cluster 3 peptides (mouse): | human homologues: | |
| 01 | SSLGGTDKELR | (SEQ ID NO: 25) |
| 06 | SSLGGTDKEL | (SEQ ID NO: 27) |
| 12,13 | SSLGGTDKE | (SEQ ID NO: 28) |
| 02,03 | SSLGGTDK | (SEQ ID NO: 29) |
| 07,09 | SSLGGTD | (SEQ ID NO: 30) |
| 05,10 | SSLGGT | (SEQ ID NO: 31) |
| 04,08,11 | SSLGG | (SEQ ID NO: 26) |
| hCD163 (SRCR-1) | SSLGGTDKELRLVDGENKCS | (SEQ ID NO: 24) |

[0414] These homologue peptides represent further highly suitable epitopes for the anti-CD163 antibody-based biopolymer scaffold.

### Example 14: Epitope Mapping of mAb 4D2 Against AdV

[0415] mAb 4D2 is a mouse IgG2a mAb targeting the adenovirus fiber epitope peptide (NCBI Reference Sequence: AP_000226.1). It represents a prototype neutralizing antibody that was generated from UV irradiated Ad2 virus (Krasnykh et al, 1998). In order to obtain cyclic antibody binding peptides from the virus neutralizing epitope, mAb 4D2 was mapped against aligned cyclic peptides derived from the fiber sequence. The sequence at amino acid positions 1 to 581 of NCBI Reference Sequence: AP_000226.1 was used as a starting sequence for designing 7mer, 10mer and 13mer cyclic peptides that were then synthesized and circularized directly on a peptide microarray and subsequently incubated with various concentrations of the antibody. The binding signal of monoclonal antibody 4D2 to the peptides yielded several binding hits that were be aligned against the sequence of the protein and subsequently clustered. The resulting clusters were designated cluster1 (length=14 amino acids), cluster2 (length=13 amino acids) and cluster3 (length=22 amino acids). Below are the aligments of the corresponding new peptides that are able to bind the mAb 4D2 paratope. The number of the peptide names corresponds to the rank of the binding signal of the antibody to the microarray (i.e. peptide 01 binds strongest, 02 second strongest, etc.). A selection of top candidate binding peptides out of the top 50 top binders was aligned against the corresponding protein sequence (first line).

| cluster1 | ETGPPTVPFLTPPF | (SEQ ID NO: 32) |
|---|---|---|
| 08 | --GPPTVPFLTP-- | (SEQ ID NO: 60) |
| 10 | ETGPPTVPFLTPP- | (SEQ ID NO: 61) |
| 21 | -TGPPTVPFLT--- | (SEQ ID NO: 62) |
| 34 | ----PTVPFLTPPF | (SEQ ID NO: 63) |

| cluster2 | HDSKLSIATQGPL | (SEQ ID NO: 64) |
|---|---|---|
| 03 | HDSKLSIATQGPL | (SEQ ID NO: 64) |
| 11 | -----SIATQGP- | (SEQ ID NO: 65) |

| cluster3 | LNLRLGQGPLFINSAHNLDINY | (SEQ ID NO: 34) |
|---|---|---|
| 02 | -NLRLGQGPLF----------- | (SEQ ID NO: 66) |
| 12 | ------QGPLFINSAH------ | (SEQ ID NO: 67) |
| 13 | --------PLFINSAHNLD--- | (SEQ ID NO: 68) |
| 15 | ----LGQGPLP----------- | (SEQ ID NO: 69) |
| 17 | LNLRLGQGPL------------ | (SEQ ID NO: 70) |
| 19 | -----GQGPLPI---------- | (SEQ ID NO: 71) |
| 29 | -NLRLGQGPLPINS-------- | (SEQ ID NO: 72) |
| 32 | ---------LFINSAHNLDINY | (SEQ ID NO: 73) |
| 33 | ----------FINSAHNLDI-- | (SEQ ID NO: 74) |
| 37 | --LRLGQGPLPI---------- | (SEQ ID NO: 75) |
| 39 | -------GPLFINSAHN----- | (SEQ ID NO: 76) |

[0416] The above peptides/sequences are highly suitable as peptides for SADCs which reduce neutralization of AdV vectors.

### Example 15: Epitope Mapping of Monoclonal Antibody 9C12 Against AdV

[0417] Monoclonal antibody 9C12 (alias mAB TC31-9C12.C9-s) was generated by immunizing mice with the hexon protein (Uniprot ID: P04133 which corresponds to GenBank: BAG48782.1). This neutralizing antibody is directed against the hexon protein and the neutralizing activity of this antibody was demonstrated by Varghese (Varghese et al, 2004). In brief, diluted antibody was incubated with GFP-expressing replication-defective Ad vector and subsequently added to HeLa cells followed by fluorescence readout. In order to map a region from which paratope binding peptides could be derived, the sequence at amino acid positions 1 to 952 of GenBank: BAG48782.1 was used as a starting sequence for designing cyclic 7mer, 10mer and 13mer peptides that were then synthesized and circularized on a peptide microarray, and subsequently incubated with various concentrations of the antibody. The binding signal of mAb 9C12 to the peptides yielded several candidates that could be aligned and clustered against the protein. An epitopic cluster region of 20 amino acids was identified from which paratope binding peptides can be preferentially derived. Below are the aligments of the corresponding peptide hits from this screen. The number of the peptide names corresponds to the ranked binding signal obtained from the microarray (i.e. peptide 01 binds strongest, 02 second strongest, etc.). Cyclic peptides were selected out of up to 50 top binders in this experiment.

| cluster1 | VDPMDEPTLLYVLFEVFDVV | (SEQ ID NO: 35) |
|---|---|---|
| 01 | ----DEPTLLYVLFEVF--- | (SEQ ID NO: 77) |
| 02 | -------TLLYVLFEVF--- | (SEQ ID NO: 78) |
| 03 | ----DEPTLLYVLF------ | (SEQ ID NO: 79) |
| 04 | -------TLLYVLFEVFDVV | (SEQ ID NO: 80) |
| 05 | -------TLLYVLF------ | (SEQ ID NO: 81) |
| 06 | ---MDEPTLLYVLFEV---- | (SEQ ID NO: 82) |
| 07 | -----EPTLLYVLFE----- | (SEQ ID NO: 83) |
| 08 | -DPMDEPTLLYVLF------ | (SEQ ID NO: 84) |
| 09 | --------LLYVLFEVFD-- | (SEQ ID NO: 85) |
| 10 | ----------YVLFEVFDVV | (SEQ ID NO: 86) |
| 11 | ------PTLLYVLFEV---- | (SEQ ID NO: 87) |
| 12 | ------PTLLYVLFEVFDV- | (SEQ ID NO: 88) |
| 13 | ---------LYVLFEVFDV- | (SEQ ID NO: 89) |
| 14 | -----EPTLLYVLFEVFD-- | (SEQ ID NO: 90) |
| 15 | ---------LYVLFEV---- | (SEQ ID NO: 91) |
| 16 | --PMDEPTLLYVLFE----- | (SEQ ID NO: 92) |
| 17 | --------LLYVLFE----- | (SEQ ID NO: 93) |
| 18 | VDPMDEPTLLYVL------- | (SEQ ID NO: 94) |
| 19 | ----------YVLFEVF--- | (SEQ ID NO: 95) |
| 20 | ------PTLLYVL------- | (SEQ ID NO: 96) |

[0418] The above peptides/sequences are highly suitable as peptides for SADCs which reduce neutralization of AdV vectors.

### Example 16: Epitope Mapping of Polyclonal Antibody Ab6982 Against AdV

[0419] Polyclonal antibody ab6982 (Abcam) was generated by immunizing rabbits with purified AdV. It reacts with all capsid proteins of Ad5 including hexon, fiber and penton. It was shown that the antibody neutralizes Ad5 infection in a bioassay at 1000 adenovirus 5 particles / ml, a 50 % inactivation of the adenovirus can be achieved at a 1/25,000 dilution of the antibody. In order to identify epitopic regions that could contain peptides for ab6982 paratope binding, the antibody was mapped against the sequences of fiber (NCBI Reference Sequence: AP_000226.1) and hexon protein (GenBank: BAG48782.1). The fiber-sequence at amino acid positions 1 to 581 of (NCBI Reference Sequence: AP_000226.1), and the hexon-sequene (GenBank: BAG48782.1) at amino acid positions 1 to 952 were used as a starting sequence for designing 7mer, 10mer and 13mer cyclic peptides synthesized on a peptid array. The binding signal of this antibody to the array yielded several peptides that were aligned and clustered against the sequence of the protein. The peptide clusters were named cluster1-7 (fiber protein) and clusters8-16 (hexon protein) according to their ranked order of cyclic peptide hits (i.e. cluster contains the strongest binders, cluster2 the second strongest etc.). Below are the aligments of the corresponding peptides that bind to polyclonal antibody ab6982. The number of the peptide names corresponds to the antibody binding signal ranking from the microarray experiment, the numbers of the clusters 1-7 and clusters 8-16 are ranked by the content of top binding peptides, respectively.

| Cluster1 | MKRARPSEDTFNPVYPYD | (SEQ ID NO: 36) |
|---|---|---|
| 001 | MKRARPSEDTF------- | (SEQ ID NO: 97) |
| 002 | -KRARPSEDTF------- | (SEQ ID NO: 98) |
| 003 | MKRARPSEDT-------- | (SEQ ID NO: 99) |
| 005 | MKRARPSEDTFN------ | (SEQ ID NO: 100) |
| 010 | ---ARPSEDTFNP----- | (SEQ ID NO: 101) |
| 019 | --RARPSEDTFN------ | (SEQ ID NO: 102) |
| 024 | ----RPSEDTF------- | (SEQ ID NO: 103) |
| 035 | MKRARPSEDTFNP----- | (SEQ ID NO: 104) |
| 040 | --RARPSEDTFNPVY--- | (SEQ ID NO: 105) |
| 041 | ---ARPSEDT-------- | (SEQ ID NO: 106) |
| 052 | -------EDTFNPVYPY- | (SEQ ID NO: 107) |
| 061 | ----RPSEDTFNPVYPY- | (SEQ ID NO: 108) |
| 129 | -KRARPSEDTFNPV---- | (SEQ ID NO: 109) |
| 130 | --------DTFNPVY--- | (SEQ ID NO: 110) |
| 150 | ----RPSEDTFNPV---- | (SEQ ID NO: 111) |
| 153 | -----PSEDTFNPVY--- | (SEQ ID NO: 112) |
| 163 | --------DTFNPVYPYD | (SEQ ID NO: 113) |
| Cluster2 | ISGTVQSAHLIIRFD | (SEQ ID NO: 37) |
| 004 | ----VQSAHLIIRF- | (SEQ ID NO: 114) |
| 006 | -------AHLIIRF- | (SEQ ID NO: 115) |
| 015 | -SGTVQSAHLIIRF- | (SEQ ID NO: 116) |
| 056 | ---TVQSAHLIIR-- | (SEQ ID NO: 117) |
| 060 | --------HLIIRFD | (SEQ ID NO: 118) |
| 065 | ------SAHLIIR-- | (SEQ ID NO: 119) |
| 076 | -----QSAHLIIRFD | (SEQ ID NO: 120) |
| 085 | ISGTVQSAHLIIR-- | (SEQ ID NO: 121) |
| 118 | --GTVQSAHLII--- | (SEQ ID NO: 122) |
| 123 | --GTVQSAHLIIRFD | (SEQ ID NO: 123) |
| 126 | -----QSAHLII--- | (SEQ ID NO: 124) |
| Cluster3 | LGQGPLFINSAHNLDINYNKGLYLP | (SEQ ID NO: 38) |
| 009 | ------------HNLDINY------ | (SEQ ID NO: 125) |
| 011 | -----LFINSAHNLDINY------- | (SEQ ID NO: 126) |
| 012 | ------------NLDINYNKGLYLF | (SEQ ID NO: 127) |
| 013 | -------FVSPNG------------ | (SEQ ID NO: 128) |
| 016 | ----------------NYINEIF-- | (SEQ ID NO: 129) |
| 020 | ------------------NKGLYLF | (SEQ ID NO: 130) |
| 021 | ---------------INYNKGLYLF | (SEQ ID NO: 131) |
| 023 | --------NSAHNLDINY------- | (SEQ ID NO: 132) |
| 032 | ------WDWSGH----NYINEIF-- | (SEQ ID NO: 133) |
| 039 | ---------SGH----NYINEIF-- | (SEQ ID NO: 134) |
| 044 | --LGTGLSF---------------- | (SEQ ID NO: 135) |
| 047 | PFLTPPF------------------ | (SEQ ID NO: 136) |
| Cluster4 | SYPFDAQNQLNLRLGQGPLFIN | (SEQ ID NO: 39) |
| 027 | -------------LGQGPLF-- | (SEQ ID NO: 137) |
| 029 | ----------NLRLGQGPLF-- | (SEQ ID NO: 138) |
| 030 | -------NQLNLRLGQGPLF-- | (SEQ ID NO: 139) |
| 058 | --------------GQGPLFI- | (SEQ ID NO: 140) |
| 059 | --------QLNLRLGQGPLFI- | (SEQ ID NO: 141) |
| 062 | SYPFDAQNQLNLR--------- | (SEQ ID NO: 142) |
| 066 | -YPFDAQNQLNLRL-------- | (SEQ ID NO: 143) |
| 070 | -----------LRLGQGPLFI- | (SEQ ID NO: 144) |
| 072 | -------NQLNLRL-------- | (SEQ ID NO: 145) |
| 073 | ---FDAQNQLNLR--------- | (SEQ ID NO: 146) |
| 082 | ------QNQLNLR--------- | (SEQ ID NO: 147) |
| 093 | ---------------QGPLFIN | (SEQ ID NO: 148) |
| 102 | --PFDAQNQLNLRLG------- | (SEQ ID NO: 149) |
| 112 | ----DAQNQLNLRL-------- | (SEQ ID NO: 150) |
| 117 | ------------RLGQGPLFIN | (SEQ ID NO: 151) |
| 136 | --------QLNLRLG------- | (SEQ ID NO: 152) |
| 147 | ---FDAQNQLNLRLGQ------ | (SEQ ID NO: 153) |
| 148 | ---------LNLRLGQGPLPIN | (SEQ ID NO: 154) |
| 169 | -----AQNQLNLRLG------- | (SEQ ID NO: 155) |
| 172 | -----AQNQLNL---------- | (SEQ ID NO: 156) |
| 173 | ---------LNLRLGQ------ | (SEQ ID NO: 157) |
| 178 | SYPFDAQNQL------------ | (SEQ ID NO: 158) |
| 197 | --PFDAQNQLNL---------- | (SEQ ID NO: 159) |
| Cluster5 | GDTTPSAYSMSFSWDWGHNYIN | (SEQ ID NO: 40) |
| 008 | ---------YSMSFSW------- | (SEQ ID NO: 160) |
| 014 | ----TPSAYSMSFSWDW------ | (SEQ ID NO: 161) |
| 022 | ----------MSFSWDW------ | (SEQ ID NO: 162) |
| 028 | -----PSAYSMSFSW-------- | (SEQ ID NO: 163) |
| 049 | --DTTPSAYSMSFSW-------- | (SEQ ID NO: 164) |
| 078 | ---TTPSAYSMSF---------- | (SEQ ID NO: 165) |
| 079 | --------YSMSFSWDWS----- | (SEQ ID NO: 166) |
| 091 | TGDTTPSAYSMSF---------- | (SEQ ID NO: 167) |
| 095 | ------------FSWDWSGHNY- | (SEQ ID NO: 168) |
| 100 | ----------SFSWDWS----- | (SEQ ID NO: 169) |
| 108 | -----SAYSMSF---------- | (SEQ ID NO: 170) |
| 134 | ----------SFSWDWSGHN-- | (SEQ ID NO: 171) |
| 143 | -----SAYSMSFSWD------- | (SEQ ID NO: 172) |
| 144 | --------SMSFSWD------- | (SEQ ID NO: 173) |
| 149 | ------------SWDWSGHNYI | (SEQ ID NO: 174) |
| 167 | ------AYSMSFS--------- | (SEQ ID NO: 175) |
| 176 | --------SMSFSWDWSGHNY- | (SEQ ID NO: 176) |
| 186 | -----------FSWDWSG---- | (SEQ ID NO: 177) |
| 193 | ------------SWDWSGH--- | (SEQ ID NO: 178) |
| Cluster6 | VLLNNSFLDPEYWNFRN | (SEQ ID NO: 41) |
| 017 | ------FLDPEYWNFR- | (SEQ ID NO: 179) |
| 018 | -----SFLDPEYWNF-- | (SEQ ID NO: 180) |
| 031 | ---------PEYWNFR- | (SEQ ID NO: 181) |
| 033 | --LNNSFLDPEYWNF-- | (SEQ ID NO: 182) |
| 034 | ---NNSFLDPEYWNFR- | (SEQ ID NO: 183) |
| 050 | ------FLDPEYW---- | (SEQ ID NO: 184) |
| 053 | --------DPEYWNF-- | (SEQ ID NO: 185) |
| 068 | ---NNSFLDPEYW---- | (SEQ ID NO: 186) |
| 088 | VLLNNSFLDPEYW---- | (SEQ ID NO: 187) |
| 113 | ----------EYWNFRN | (SEQ ID NO: 188) |
| 114 | --LNNSFLDPEY----- | (SEQ ID NO: 189) |
| 155 | -------LDPEYWNFRN | (SEQ ID NO: 190) |
| 180 | --LNNSFLD-------- | (SEQ ID NO: 191) |
| 187 | ----NSFLDPEYWN--- | (SEQ ID NO: 192) |
| Cluster7 | HNYINEIFATSSYTFSYIA | (SEQ ID NO: 42) |
| 042 | ----------SSYTFSY-- | (SEQ ID NO: 193) |
| 043 | -------FATSSYTFSY-- | (SEQ ID NO: 194) |
| 055 | --YINEIFATSSYTF---- | (SEQ ID NO: 195) |
| 064 | -----------SYTFSYI- | (SEQ ID NO: 196) |
| 080 | --------ATSSYTF---- | (SEQ ID NO: 197) |
| 089 | -----EIFATSSYTF---- | (SEQ ID NO: 198) |
| 092 | ----NEIFATSSYTFSY-- | (SEQ ID NO: 199) |
| 097 | --------ATSSYTFSYI- | (SEQ ID NO: 200) |
| 099 | HNYINEIFATSSY------ | (SEQ ID NO: 201) |
| 104 | ------IFATSSY------ | (SEQ ID NO: 202) |
| 110 | ---INEIFATSSY------ | (SEQ ID NO: 203) |
| 119 | -NYINEIFATSSYT----- | (SEQ ID NO: 204) |
| 168 | --YINEIFA---------- | (SEQ ID NO: 205) |
| 181 | ------------YTFSYIA | (SEQ ID NO: 206) |
| 200 | -----EIFATSSYTFSYI- | (SEQ ID NO: 207) |
| Cluster8 | DEAATALEINLEEEDDDNEDEVDEQAEQQKTH | (SEQ ID NO: 43) |
| 01 | -----ALEINLEEEDDDN-------------- | (SEQ ID NO: 208) |
| 02 | ---ATALEINLEEEDD---------------- | (SEQ ID NO: 209) |
| 03 | -EAATALEINLEEE------------------ | (SEQ ID NO: 210) |
| 04 | ------LEINLEE------------------- | (SEQ ID NO: 211) |
| 05 | ----TALEINLEEEDDD--------------- | (SEQ ID NO: 212) |
| 06 | -------EINLEEE------------------ | (SEQ ID NO: 213) |
| 07 | -----ALEINLEEED----------------- | (SEQ ID NO: 214) |
| 08 | ------LEINLEEEDD---------------- | (SEQ ID NO: 215) |
| 09 | ----TALEINLEEE------------------ | (SEQ ID NO: 216) |
| 11 | DEAATALEINLEE------------------- | (SEQ ID NO: 217) |
| 13 | ------LEINLEEEDDDNE------------- | (SEQ ID NO: 218) |
| 14 | --AATALEINLEEED----------------- | (SEQ ID NO: 219) |
| 15 | -------EINLEEEDDD--------------- | (SEQ ID NO: 220) |
| 19 | ---ATALEINLEE------------------- | (SEQ ID NO: 221) |
| 23 | --------INLEEEDDDN-------------- | (SEQ ID NO: 222) |
| 27 | ---------NLEEEDDDNE------------- | (SEQ ID NO: 223) |
| 10 | -------------------DEVDEQA------ | (SEQ ID NO: 224) |
| 12 | -------------EDDDNEDEVDEQA------ | (SEQ ID NO: 225) |
| 16 | ---------------DDNEDEVDEQAEQ---- | (SEQ ID NO: 226) |
| 17 | --------------------EVDEQAE----- | (SEQ ID NO: 227) |
| 18 | ----------------DNEDEVDEQA------ | (SEQ ID NO: 228) |
| 20 | ---------------------VDEQAEQ---- | (SEQ ID NO: 229) |
| 21 | ------------------EDEVDEQAEQQKT- | (SEQ ID NO: 230) |
| 22 | ------------------EDEVDEQAEQ---- | (SEQ ID NO: 231) |
| 24 | -------------------DEVDEQAEQQKTH | (SEQ ID NO: 232) |
| 25 | -----------------NEDEVDEQAEQQK-- | (SEQ ID NO: 233) |
| 26 | -------------------DEVDEQAEQQ--- | (SEQ ID NO: 234) |
| Cluster9 | INLEEEDDDNEDEVDEQAEQ | (SEQ ID NO: 44) |
| 028 | EINLEEEDDDNED------- | (SEQ ID NO: 235) |
| 029 | --NLEEEDDDNEDEV----- | (SEQ ID NO: 236) |
| 032 | -INLEEED------------ | (SEQ ID NO: 237) |
| 034 | ---LEEEDDDNED------- | (SEQ ID NO: 238) |
| 035 | -INLEEEDDDNEDE------ | (SEQ ID NO: 239) |
| 037 | -------DDDNEDEVDEQAE | (SEQ ID NO: 240) |
| 053 | ---LEEEDDDNEDEVD---- | (SEQ ID NO: 241) |
| 057 | --------DDNEDEVDEQ-- | (SEQ ID NO: 242) |
| 063 | ------EDDDNED------- | (SEQ ID NO: 243) |
| 065 | --NLEEEDD----------- | (SEQ ID NO: 244) |
| 078 | --------DDNEDEV----- | (SEQ ID NO: 245) |
| 087 | -------DDDNEDEVDE--- | (SEQ ID NO: 246) |
| 096 | -------DDDNEDE------ | (SEQ ID NO: 247) |
| 097 | ----EEEDDDNEDE------ | (SEQ ID NO: 248) |
| 108 | -----EEDDDNE--------- | (SEQ ID NO: 249) |
| 121 | ------EDDDNEDEVD----- | (SEQ ID NO: 250) |
| 126 | -----------EDEVDEQ--- | (SEQ ID NO: 251) |
| 148 | -----EEDDDNEDEVDEQ--- | (SEQ ID NO: 252) |
| 185 | -----EEDDDNEDEV------ | (SEQ ID NO: 253) |
| 188 | ----EEEDDDNEDEVDE---- | (SEQ ID NO: 254) |
| Cluster10 | DNEDEVDEQAEQQKTHVF | (SEQ ID NO: 45) |
| 030 | ----EVDEQAEQQK---- | (SEQ ID NO: 255) |
| 031 | DNEDEVDEQAEQQ----- | (SEQ ID NO: 256) |
| 036 | -----VDEQAEQQKT--- | (SEQ ID NO: 257) |
| 038 | ----EVDEQAEQQKTHV- | (SEQ ID NO: 258) |
| 041 | -----VDEQAEQQKTHVF | (SEQ ID NO: 259) |
| Cluster11 | EWDEAATALEINLEE | (SEQ ID NO: 46) |
| 033 | --------ALEINLE | (SEQ ID NO: 260) |
| 042 | --WDEAATALEINLE | (SEQ ID NO: 261) |
| 043 | -----AATALEINLE | (SEQ ID NO: 262) |
| 112 | ENDEAATALEINL-- | (SEQ ID NO: 263) |
| 124 | ---EAATALEINL-- | (SEQ ID NO: 264) |
| Cluster12 | PKVVLYSEDVDIETPDTHISYMP | (SEQ ID NO: 47) |
| 039 | ----LYSEDVDIET--------- | (SEQ ID NO: 265) |
| 040 | ----LYSEDVDIETPDT------ | (SEQ ID NO: 266) |
| 044 | -KVVLYSEDVDIET--------- | (SEQ ID NO: 267) |
| 045 | -----------IETPDTH----- | (SEQ ID NO: 268) |
| 046 | ---------VDIETPDTHI---- | (SEQ ID NO: 269) |
| 047 | ---VLYSEDVDIE---------- | (SEQ ID NO: 270) |
| 048 | --------DVDIETPDTHISY-- | (SEQ ID NO: 271) |
| 049 | --VVLYSEDVDIETP-------- | (SEQ ID NO: 272) |
| 050 | ------SEDVDIETPDTHI---- | (SEQ ID NO: 273) |
| 051 | ------------ETPDTHI---- | (SEQ ID NO: 274) |
| 052 | ---VLYSEDVDIETPD------- | (SEQ ID NO: 275) |
| 054 | --------DVDIETPDTH----- | (SEQ ID NO: 276) |
| 055 | ----------DIETPDTHIS--- | (SEQ ID NO: 277) |
| 056 | -------EDVDIETPDTHIS--- | (SEQ ID NO: 278) |
| 058 | -----------IETPDTHISY-- | (SEQ ID NO: 279) |
| 059 | -----YSEDVDIETPDTH----- | (SEQ ID NO: 280) |
| 060 | ---------VDIETPDTHISYM- | (SEQ ID NO: 281) |
| 061 | PKVVLYSEDVDIE---------- | (SEQ ID NO: 282) |
| 062 | ----------DIETPDT------ | (SEQ ID NO: 283) |
| 064 | ----------DIETPDTHISYMP | (SEQ ID NO: 284) |
| 070 | -------EDVDIETPDT------ | (SEQ ID NO: 285) |
| 071 | ------------ETPDTHISYM- | (SEQ ID NO: 286) |
| 159 | -----------IETPDTHISYMP | (SEQ ID NO: 287) |
| Cluster13 | YIPESYKDRMYSFFRNF | (SEQ ID NO: 48) |
| 072 | -------DRMYSFFRNF | (SEQ ID NO: 288) |
| 086 | -------DRMYSFF--- | (SEQ ID NO: 289) |
| 104 | ----------YSFFRNF | (SEQ ID NO: 290) |
| 107 | -IPESYKDRMYSFF--- | (SEQ ID NO: 291) |
| 120 | ----SYKDRMYSFF--- | (SEQ ID NO: 292) |
| 127 | ---ESYKDRMYSF---- | (SEQ ID NO: 293) |
| 143 | ------KDRMYSF---- | (SEQ ID NO: 294) |
| 152 | YIPESYKDRMYSF---- | (SEQ ID NO: 295) |
| 153 | --PESYKDRMYSFFR-- | (SEQ ID NO: 296) |
| 160 | -----YKDRMYSFFR-- | (SEQ ID NO: 297) |
| Cluster14 | DSIGDRTRYFSMW | (SEQ ID NO: 49) |
| 073 | ------TRYFSMW | (SEQ ID NO: 298) |
| 080 | ---GDRTRYF--- | (SEQ ID NO: 299) |
| 095 | DSIGDRTRYF--- | (SEQ ID NO: 300) |
| 100 | DSIGDRTRYFSMW | (SEQ ID NO: 301) |
| 101 | ---GDRTRYFSMW | (SEQ ID NO: 302) |
| Cluster15 | SYKDRMYSFFRNF | (SEQ ID NO: 50) |
| 072 | ---DRMYSFFRNF | (SEQ ID NO: 303) |
| 099 | SYKDRMYSFFRNF | (SEQ ID NO: 304) |
| Cluster16 | FLVQMLANYNIGYQGFY | (SEQ ID NO: 51) |
| 106 | -------NYNIGYQGFY | (SEQ ID NO: 305) |
| 122 | ------ANYNIGYQGF- | (SEQ ID NO: 306) |
| 123 | ----MLANYNIGYQGFY | (SEQ ID NO: 307) |
| 136 | ----------IGYQGFY | (SEQ ID NO: 308) |
| 184 | FLVQMLANYNIGY---- | (SEQ ID NO: 309) |
| 187 | ---------NIGYQGF- | (SEQ ID NO: 310) |
| 190 | ---QMLANYNIGYQGF- | (SEQ ID NO: 311) |

[0420] The above peptides/sequences are highly suitable as peptides for SADCs which reduce neutralization of AdV vectors. Importantly, binding of these peptides to the paratope of unwanted antibodies can be even further improved by mutating 1, 2 or 3 amino acids in order to generate mimotopes with improved antibody binding properties.

### Example 17: Epitope Mapping of mAb ADK8 Against AAV

[0421] Monoclonal antibody ADK8 was generated by immunizing mice with AAV8 capsids. It is directed against the assembled AAV8 capsid (Sonntag et al, 2011). The neutralizing function of the antibody was previously demonstrated (Gurda et al, 2012). In brief, AAV8 was pre-incubated with ADK8 which lead to a decline in the number of virus particles present in the cytoplasm. Moreover, the binding of AAV8 to the nuclear membrane as well as the nuclear entry were abrogated following neutralization by ADK8. This suggests that ADK8 neutralization might interfere either with the cellular entry and / or the transport to the nucleus. ADK8 also cross-reacts with capsid proteins from other AAV serotypes such as AAV1, AAV3, AAV7 (Mietzsch et al, 2014) and was therefore chosen as an example from which general conclusions about the present invention can be drawn.

[0422] As for the other antibodies (see examples above), several clusters were identified, delineating regions from which preferred peptides can be deduced. Most preferably, the peptides aligned below according to their binding strengths can be used for selective antibody depletion and detection as hereinabove.

| Cluster1 | WQNRDVYLQGPIWAKIP | (SEQ ID NO: 52) |
|---|---|---|
| 01 | ------YLQGPIW---- | (SEQ ID NO: 312) |
| 02 | -----VYLQGPI----- | (SEQ ID NO: 313) |
| 03 | WQNRDVY---------- | (SEQ ID NO: 314) |
| 05 | ----DVYLQGP------ | (SEQ ID NO: 315) |
| 08 | -QNRDVYL--------- | (SEQ ID NO: 316) |
| 12 | -------LQGPIWA--- | (SEQ ID NO: 317) |
| 20 | ---RDVYLQG------- | (SEQ ID NO: 318) |
| 50 | --NRDVYLQ-------- | (SEQ ID NO: 319) |
| Cluster2 | DNTYFGYSTPWGYFDFNRFHC | (SEQ ID NO: 53) |
| 07 | ---YFGYSTPWGYFDF----- | (SEQ ID NO: 320) |
| 09 | ----FGYSTPWGYF------- | (SEQ ID NO: 321) |
| 10 | -----GYSTPWGYFD------ | (SEQ ID NO: 322) |
| 11 | ------YSTPWGYFDF----- | (SEQ ID NO: 323) |
| 17 | -NTYFGYSTPWGYF------- | (SEQ ID NO: 324) |
| 18 | --------TPWGYFDFNRFHC | (SEQ ID NO: 325) |
| 23 | --TYFGYSTPWGYFD------ | (SEQ ID NO: 326) |
| 26 | DNTYFGYSTPWGY-------- | (SEQ ID NO: 327) |
| 28 | ---YFGYSTPWGY-------- | (SEQ ID NO: 328) |
| 34 | ----FGYSTPWGYFDFN---- | (SEQ ID NO: 329) |
| Cluster3 | MANQAKNWLPGPCY | (SEQ ID NO: 54) |
| 04 | ------NWLPGPC- | (SEQ ID NO: 330) |
| 15 | -------WLPGPCY | (SEQ ID NO: 331) |
| 16 | ---QAKNWLPGPC- | (SEQ ID NO: 332) |
| 21 | ----AKNWLPGPCY | (SEQ ID NO: 333) |
| 25 | MANQAKNWLPGPC- | (SEQ ID NO: 334) |
| Cluster4 | LPYVLGSAHQGCLPPFP | (SEQ ID NO: 55) |
| 06 | ---------QGCLPPF- | (SEQ ID NO: 335) |
| 13 | ----------GCLPPFP | (SEQ ID NO: 336) |
| 27 | ---VLGSAHQGCLPPF- | (SEQ ID NO: 337) |
| 32 | LPYVLGSAHQGCL---- | (SEQ ID NO: 338) |
| 37 | -YVLGSAHQGC------ | (SEQ ID NO: 339) |
| 38 | ----------CLPPFPA | (SEQ ID NO: 340) |
| 39 | -----SAHQGCLPPF-- | (SEQ ID NO: 341) |
| 45 | --VLGSAHQGCL----- | (SEQ ID NO: 342) |
| 46 | PYVLGSAHQGCLP---- | (SEQ ID NO: 343) |
| Cluster5 | NGSQAVGRSSFYCLEYF | (SEQ ID NO: 56) |
| 14 | ------GRSSFYC---- | (SEQ ID NO: 344) |
| 22 | ----AVGRSSFYCLEYF | (SEQ ID NO: 345) |
| 24 | ----AVGRSSFYCL--- | (SEQ ID NO: 346) |
| 33 | ---QAVGRSSFYCLEY- | (SEQ ID NO: 347) |
| 35 | NGSQAVGRSSFYC---- | (SEQ ID NO: 348) |
| Cluster6 | PLIDQYLYYL | (SEQ ID NO: 57) |
| 19 | ---DQYLYYL | (SEQ ID NO: 349) |
| 29 | PLIDQYLYYL | (SEQ ID NO: 350) |
| 36 | --IDQYLYY- | (SEQ ID NO: 351) |
| Cluster7 | EERFFPSNGILIF | (SEQ ID NO: 58) |
| 31 | ---FFPSNGILIF | (SEQ ID NO: 352) |
| 49 | EERFFPSNGILIF | (SEQ ID NO: 353) |
| Cluster8 | ADGVGSSSGNWHC | (SEQ ID NO: 59) |
| 42 | ---VGSSSGNWHC | (SEQ ID NO: 354) |
| 48 | ADGVGSSSGNWHC | (SEQ ID NO: 355) |

### Example 18: Screen for Anti-AAV Antibodies in Human Sera

[0423] 2452 linear peptides derived from the sequences of 16 different AAVs used in gene therapy and with a sequence length of 15 amino-acids each were synthesized.

[0424] Samples obtained from human donors were screened for antibodies against these AAV-derived peptides immobilized on microarrays. To this end, IgG was prepared from blood obtained from the human donors by protein G purification. Each IgG sample was incubated with the peptide microarrays and Ig binding signals were detected by fluorescence. All antibody binding signals to the peptides on the arrays were background subtracted and ranked for each sample and a deduplicated aggregate of the respective top 250 peptide hits for each donor with the corresponding protein sequence of origin (as obtained from UniProt or other sources) was compiled (designated as group IV). Further, the deduplicated aggregate of the respective top 50 peptide hits for each donor was compiled and designated as group III. Further, the deduplicated aggregate of the respective top 25 peptide hits for each donor was compiled and designated as group II. Finally, the deduplicated aggregate of the respective top 10 peptide hits for each donor was compiled and designated as group I.

[0425] Detailed results are shown in Table 1 below. Altogether, group I contains 110 distinct peptide hits (assigned to the corresponding AAV vectors in Table 1), group II contains 289 distinct peptide hits, group III contains 428 distinct peptide hits and group IV contains 1271 distinct peptide hits. Evidently, group I is a subset of group II which in turn is a subset of group III which in turn is a subset of group IV. Groups I-IV correspond to the top 4.4%, 10.5%, 17.5% and 51.8%, respectively, of all peptides screened.

[0426] Thus, all listed peptides, preferably peptides belonging to group III, even more preferably belonging to group II and most preferably belonging to group I (i.e. to the top 4.4%), provide sequences from which shorter peptide sequences can be derived for antibody depletion according to the present invention. Furthermore, also other peptide sequences (or fragments) from the proteins from which the peptides of Table 1 were derived (preferably from group III, more preferably however from group II, most preferably from group I), are suited to be used for SADCs according to the present invention. In addition, these peptides can also be used as probes for the diagnostic detection of anti-AAV antibodies in biological samples such as human sera.

### Table 1

[0427] This table lists the detailed results of a screen for linear peptides as a basis for the construction of anti-AAV antibody depleting SADCs according to the present invention. These peptides are also suitable typing neutralizing antibodies directed against AAV gene therapy vectors. If not stated otherwise, the peptides represent fragments from different AAV VP1 proteins. Source given is either UniProt ID, GenBank ID, PDB ID or AAV strain name.

| peptide # | SEQ ID NO | peptide | group I | group II | group III | group IV | source |
|---|---|---|---|---|---|---|---|
| 1 | 383 | LRTGNNFEFSYQFED | X | X | X | X | AA088201.1 |
| 2 | 384 | TGNNFEFSYQFEDVP | X | X | X | X | AA088201.1 |
| 3 | 385 | VATEQYGWADNLQQ | X | X | X | X | AA088201.1 |
| 4 | 386 | FEFSYFEDVPFHSSY | X | X | X | X | AAV-Rh74 c |
| 5 | 387 | RTGNFEFSYFEDVPF | X | X | X | X | AAV-Rh74 c |
| 6 | 388 | MLRTGNFEFSYFEDV | X | X | X | X | AAV-Rh74 c |
| 7 | 389 | PVPADPPTTFNQAKL | X | X | X | X | AAV-Rh74 c |
| 8 | 390 | TQSTGGTAGTQQLLF | X | X | X | X | AAV-Rh74 c |
| 9 | 391 | EEEIKTTNPVATEQY | X | X | X | X | AAV-Rh74 c |
| 10 | 392 | SSVMLTSEEEIKTTN | X | X | X | X | AAV-Rh74 c |
| 11 | 393 | VDFAVNTEGTYSEPR | X | X | X | X | AAV-Rh74 c |
| 12 | 394 | SVPDPQPIGEPPAGP | X | X | X | X | AAV-Rh74 c |
| 13 | 395 | EEIKTTNPVATEQYG | X | X | X | X | AAV-Rh74 c |
| 14 | 396 | PIGEPPAGPSGLGSG | X | X | X | X | AAV-Rh74 c |
| 15 | 397 | VNTEGTYSEPRPIGT | X | X | X | X | AAV-Rh74 c |
| 16 | 398 | YSSVMLTSEEEIKTT | X | X | X | X | AAV-Rh74 c |
| 17 | 399 | VATNHQSAQTLAVPF | X | X | X | X | ALU85156.1 |
| 18 | 400 | VSTNLQRGNLALGET | X | X | X | X | AOD99651.1 |
| 19 | 401 | ALGETTRPATAAQTQ | X | X | X | X | AOD99656.1 |
| 20 | 402 | TQTTGGTTNTQTLGF | X | X | X | X | pdb3J1QA |
| 21 | 403 | DDEEKFFPQSGVLIF | X | X | X | X | P03135 |
| 22 | 404 | EEEIRTTNPVATEQY | X | X | X | X | P03135 |
| 23 | 405 | PVEPDSSSGTGKAGQ | X | X | X | X | P03135 |
| 24 | 406 | IQYTSNYNKSVNVDF | X | X | X | X | P03135 |
| 25 | 407 | TDEEEIRTTNPVATE | X | X | X | X | P03135 |
| 26 | 408 | VDFTVDTNGVYSEPR | X | X | X | X | P03135 |
| 27 | 409 | VDTNGVYSEPRPIGT | X | X | X | X | P03135 |
| 28 | 410 | TMATGSGAPMADNNE | X | X | X | X | P03135 |
| 29 | 411 | TSTVQVFTDSEYQLP | X | X | X | X | P03135 |
| 30 | 412 | LYYLSRTNTPSGTTT | X | X | X | X | P03135 |
| 31 | 413 | TADVNTQGVLPGMVW | X | X | X | X | P03135 |
| 32 | 414 | GSEKTNVDIEKVMIT | X | X | X | X | P03135 |
| 33 | 415 | TNTMATGSGAPMADN | X | X | X | X | P03135 |
| 34 | 416 | WNPEIQYTSNYNKSV | X | X | X | X | P03135 |
| 35 | 417 | SYTFEDVPFHSSYAH | X | X | X | X | O56137 |
| 36 | 418 | EDVPFHSSYAHSQSL | X | X | X | X | O56137 |
| 37 | 419 | SSTDPATGDVHVMGA | X | X | X | X | O56137 |
| 38 | 420 | ATERFGTVAVNLQSS | X | X | X | X | O56137 |
| 39 | 421 | WLEDNLSEGIREWWD | X | X | X | X | O56137 |
| 40 | 422 | EEEIKATNPVATERF | X | X | X | X | O56137 |
| 41 | 423 | LEDNLSEGIREWWDL | X | X | X | X | O56137 |
| 42 | 424 | DAEFQERLQEDTSFG | X | X | X | X | O56137 |
| 43 | 425 | EWELQKENSKRWNPE | X | X | X | X | O56137 |
| 44 | 426 | SFITQYSTGQVSVEI | X | X | X | X | O56137 |
| 45 | 427 | EIEWELQKENSKRWN | X | X | X | X | O56137 |
| 46 | 428 | ITQYSTGQVSVEIEW | X | X | X | X | O56137 |
| 47 | 429 | TDEEEIKATNPVATE | X | X | X | X | O56137 |
| 48 | 430 | EEGAKTAPGKKRPVE | X | X | X | X | O56137 |
| 49 | 431 | IQVKEVTTNDGVTTI | X | X | X | X | O56137 |
| 50 | 432 | SDSEYQLPYVLGSAH | X | X | X | X | O56137 |
| 51 | 433 | PLGEPPATPAAVGPT | X | X | X | X | O56137 |
| 52 | 434 | SSASTGASNDNHYFG | X | X | X | X | O56137 |
| 53 | 435 | PVDQSPQEPDSSSGV | X | X | X | X | O56139 |
| 54 | 436 | EEAAKTAPGKKRPVD | X | X | X | X | O56139 |
| 55 | 437 | APGKKRPVDQSPQEP | X | X | X | X | O56139 |
| 56 | 438 | ILEPLGLVEEAAKTA | X | X | X | X | O56139 |
| 57 | 439 | TRTVNDQGALPGMVW | X | X | X | X | O56139 |
| 58 | 440 | KRPVDQSPQEPDSSS | X | X | X | X | O56139 |
| 59 | 441 | PLGEPPAAPTSLGSN | X | X | X | X | O56139 |
| 60 | 442 | GKKRPVDQSPQEPDS | X | X | X | X | O56139 |
| 61 | 443 | KTAPGKKRPVDQSPQ | X | X | X | X | O56139 |
| 62 | 444 | SNAELDNVMITDEEE | X | X | X | X | O56139 |
| 63 | 445 | WLEDNLSEGIREWWA | X | X | X | X | Q6JC40 |
| 64 | 446 | PVPADPPTAFNKDKL | X | X | X | X | Q6JC40 |
| 65 | 447 | EFENVPFHSSYAHSQ | X | X | X | X | Q6JC40 |
| 66 | 448 | FQERLKEDTSFGGNL | X | X | X | X | Q6JC40 |
| 67 | 449 | PQILIKNTPVPADPP | X | X | X | X | Q6JC40 |
| 68 | 450 | ADAEFQERLKEDTSF | X | X | X | X | Q6JC40 |
| 69 | 451 | EEIKTTNPVATESYG | X | X | X | X | Q6JC40 |
| 70 | 452 | VEFAVNTEGVYSEPR | X | X | X | X | Q6JC40 |
| 71 | 453 | AEFQERLKEDTSFGG | X | X | X | X | Q6JC40 |
| 72 | 454 | EPDSSAGIGKSGAQP | X | X | X | X | Q6JC40 |
| 73 | 455 | LIKNTPVPADPPTAF | X | X | X | X | Q6JC40 |
| 74 | 456 | VMITNEEEIKTTNPV | X | X | X | X | Q6JC40 |
| 75 | 457 | VNTEGVYSEPRPIGT | X | X | X | X | Q6JC40 |
| 76 | 458 | DKLNSFITQYSTGQV | X | X | X | X | Q6JC40 |
| 77 | 459 | VATESYGQVATNHQS | X | X | X | X | Q6JC40 |
| 78 | 460 | DDEERFFPSNGILIF | X | X | X | X | Q8JQF8 |
| 79 | 461 | EEEIKTTNPVATEEY | X | X | X | X | Q8JQF8 |
| 80 | 462 | PVPADPPTTFNQSKL | X | X | X | X | Q8JQF8 |
| 81 | 463 | LIKNTPVPADPPTTF | X | X | X | X | Q8JQF8 |
| 82 | 464 | SSSGNWHCDSTWLGD | X | X | X | X | Q8JQF8 |
| 83 | 465 | TSVDFAVNTEGVYSE | X | X | X | X | Q8JQF8 |
| 84 | 466 | TTTGQNNNSNFAWTA | X | X | X | X | Q8JQF8 |
| 85 | 467 | VDFAVNTEGVYSEPR | X | X | X | X | Q8JQF8 |
| 86 | 468 | VSTTTGQNNNSNFAW | X | X | X | X | Q8JQF8 |
| 87 | 469 | KTAPGKKRPVEPSPQ | X | X | X | X | Q8JQF8 |
| 88 | 470 | TQTTGGTANTQTLGF | X | X | X | X | Q8JQF8 |
| 89 | 471 | VLEPLGLVEEGAKTA | X | X | X | X | Q8JQF8 |
| 90 | 472 | EEVGEGLREFLGLEA | X | X | X | X | Q9YIJ1 |
| 91 | 473 | DAEFQEKLADDTSFG | X | X | X | X | Q9YIJ1 |
| 92 | 474 | SFVDHPPDWLEEVGE | X | X | X | X | Q9YIJ1 |
| 93 | 475 | EWELKKENSKRWNPE | X | X | X | X | Q9YIJ1 |
| 94 | 476 | EMEWELKKENSKRWN | X | X | X | X | Q9YIJ1 |
| 95 | 477 | TNNYNDPQFVDFAPD | X | X | X | X | Q9YIJ1 |
| 96 | 478 | FEEVPFHSSFAPSQN | X | X | X | X | Q9YIJ1 |
| 97 | 479 | QYTNNYNDPQFVDFA | X | X | X | X | Q9YIJ1 |
| 98 | 480 | TSTVQVFTDDDYQLP | X | X | X | X | Q9YIJ1 |
| 99 | 481 | EDSKPSTSSDAEAGP | X | X | X | X | Q9YIJ1 |
| 100 | 482 | EEGAKTAPTGKRIDD | X | X | X | X | Q9YIJ1 |
| 101 | 483 | EVPFHSSFAPSQNLF | X | X | X | X | Q9YIJ1 |
| 102 | 484 | SSFITQYSTGQVTVE | X | X | X | X | Q9YIJ1 |
| 103 | 485 | ELEGASYQVPPQPNG | X | X | X | X | Q9YIJ1 |
| 104 | 486 | ERDVYLQGPIWAKIP | X | X | X | X | Q9YIJ1 |
| 105 | 487 | PQYGYATLNRDNTEN | X | X | X | X | Q9YIJ1 |
| 106 | 488 | QVTVEMEWELKKENS | X | X | X | X | Q9YIJ1 |
| 107 | 489 | VTVQDSTTTIANNLT | X | X | X | X | Q9YIJ1 |
| 108 | 490 | YNEQLEAGDNPYLKY | X | X | X | X | Q9YIJ1 |
| 109 | 491 | YNNHQYREIKSGSVD | X | X | X | X | Q9YIJ1 |
| 110 | 492 | TSSDAEAGPSGSQQL | X | X | X | X | Q9YIJ1 |
| 111 | 493 | FEFSYQFEDVPFHSS | | X | X | X | AA088201.1 |
| 112 | 494 | NNFEFSYQFEDVPFH | | X | X | X | AA088201.1 |
| 113 | 495 | YQFEDVPFHSSYAHS | | X | X | X | AA088201.1 |
| 114 | 496 | QGAGKDNVDYSSVML | | X | X | X | AA088201.1 |
| 115 | 497 | TPVPADPPTTFSQAK | | X | X | X | AA088201.1 |
| 116 | 498 | IKTTNPVATEQYGW | | X | X | X | AA088201.1 |
| 117 | 499 | GNFEFSYFEDVPFHS | | X | X | X | AAV-Rh74 c |
| 118 | 500 | FSYFEDVPFHSSYAH | | X | X | X | AAV-Rh74 c |
| 119 | 501 | YFEDVPFHSSYAHSQ | | X | X | X | AAV-Rh74 c |
| 120 | 502 | EYFPSQMLRTGNFEF | | X | X | X | AAV-Rh74 c |
| 121 | 503 | EIKTTNPVATEQYGW | | X | X | X | AAV-Rh74 c |
| 122 | 504 | RTQSTGGTAGTQQLL | | X | X | X | AAV-Rh74 c |
| 123 | 505 | DNVDYSSVMLTSEEE | | X | X | X | AAV-Rh74 c |
| 124 | 506 | DEERFFPSSGVLMFG | | X | X | X | AAV-Rh74 c |
| 125 | 507 | TNVDFAVNTEGTYSE | | X | X | X | AAV-Rh74 c |
| 126 | 508 | EIQYTSNYYKSTNVD | | X | X | X | AAV-Rh74 c |
| 127 | 509 | RVSTTLSQNNNSNFA | | X | X | X | AAV-Rh74 c |
| 128 | 510 | SESVPDPQPIGEPPA | | X | X | X | AAV-Rh74 c |
| 129 | 511 | QRVSTTLSQNNNSNF | | X | X | X | AAV-Rh74 c |
| 130 | 512 | VDYSSVMLTSEEEIK | | X | X | X | AAV-Rh74 c |
| 131 | 513 | PQPIGEPPAGPSGLG | | X | X | X | AAV-Rh74 c |
| 132 | 514 | QQRVSTTLSQNNNSN | | X | X | X | AAV-Rh74 c |
| 133 | 515 | VSTTLSQNNNSNFAW | | X | X | X | AAV-Rh74 c |
| 134 | 516 | TTRPATAPQIGTVNS | | X | X | X | AOD99652.1 |
| 135 | 517 | EYGAVAINNQAANLA | | X | X | X | AOD99654.1 |
| 136 | 518 | TTRPATAAQTQWNN | | X | X | X | AOD99656.1 |
| 137 | 519 | NQSLALGETTRPAST | | X | X | X | AOD99659.1 |
| 138 | 520 | GQMATNNQSLALGET | | X | X | X | AOD99659.1 |
| 139 | 521 | MATNNQSLALGETTR | | X | X | X | AOD99659.1 |
| 140 | 522 | TNNQSLALGETTRPA | | X | X | X | AOD99659.1 |
| 141 | 523 | DSVPDPQPIGEPPAA | | X | X | X | pdb3J1QA |
| 142 | 524 | TGDADSVPDPQPIGE | | X | X | X | pdb3J1QA |
| 143 | 525 | SLTMAAGGGAPMADN | | X | X | X | pdb3J1QA |
| 144 | 526 | TTGGTTNTQTLGFSQ | | X | X | X | pdb3J1QA |
| 145 | 527 | LYYLSRTQTTGGTTN | | X | X | X | pdb3J1QA |
| 146 | 528 | SRTQTTGGTTNTQTL | | X | X | X | pdb3J1QA |
| 147 | 529 | YLSRTQTTGGTTNTQ | | X | X | X | pdb3J1QA |
| 148 | 530 | DGYLPDWLEDTLSEG | | X | X | X | P03135 |
| 149 | 531 | PPFPADVFMVPQYGY | | X | X | X | P03135 |
| 150 | 532 | GEPVNEADAAALEHD | | X | X | X | P03135 |
| 151 | 533 | VNVDFTVDTNGVYSE | | X | X | X | P03135 |
| 152 | 534 | EEKFFPQSGVLIFGK | | X | X | X | P03135 |
| 153 | 535 | PDWLEDTLSEGIRQW | | X | X | X | P03135 |
| 154 | 536 | PVNEADAAALEHDKA | | X | X | X | P03135 |
| 155 | 537 | TNVDIEKVMITDEEE | | X | X | X | P03135 |
| 156 | 538 | VDIEKVMITDEEEIR | | X | X | X | P03135 |
| 157 | 539 | PEIQYTSNYNKSVNV | | X | X | X | P03135 |
| 158 | 540 | VEEPVKTAPGKKRPV | | X | X | X | P03135 |
| 159 | 541 | ASHKDDEEKFFPQSG | | X | X | X | P03135 |
| 160 | 542 | EPVNEADAAALEHDK | | X | X | X | P03135 |
| 161 | 543 | ERHKDDSRGLVLPGY | | X | X | X | P03135 |
| 162 | 544 | GNSSGNWHCDSTWMG | | X | X | X | P03135 |
| 163 | 545 | PVPANPSTTFSAAKF | | X | X | X | P03135 |
| 164 | 546 | AAALEHDKAYDRQLD | | X | X | X | P03135 |
| 165 | 547 | FNGLDKGEPVNEADA | | X | X | X | P03135 |
| 166 | 548 | YTSNYNKSVNVDFTV | | X | X | X | P03135 |
| 167 | 549 | EDTLSEGIRQWWKLK | | X | X | X | P03135 |
| 168 | 550 | EPDSSSGTGKAGQQP | | X | X | X | P03135 |
| 169 | 551 | NNSEYSWTGATKYHL | | X | X | X | P03135 |
| 170 | 552 | SNYNKSVNVDFTVDT | | X | X | X | P03135 |
| 171 | 553 | SSQSGASNDNHYFGY | | X | X | X | P03135 |
| 172 | 554 | KRWNPEIQYTSNYNK | | X | X | X | P03135 |
| 173 | 555 | YLSRTNTPSGTTTQS | | X | X | X | P03135 |
| 174 | 556 | YTFEDVPFHSSYAHS | | X | X | X | O56137 |
| 175 | 557 | FEDVPFHSSYAHSQS | | X | X | X | O56137 |
| 176 | 558 | QSSSTDPATGDVHVM | | X | X | X | O56137 |
| 177 | 559 | PDWLEDNLSEGIREW | | X | X | X | O56137 |
| 178 | 560 | DWLEDNLSEGIREWW | | X | X | X | O56137 |
| 179 | 561 | QYSTGQVSVEIEWEL | | X | X | X | O56137 |
| 180 | 562 | DGYLPDWLEDNLSEG | | X | X | X | O56137 |
| 181 | 563 | EDNLSEGIREWWDLK | | X | X | X | O56137 |
| 182 | 564 | DNHYFGYSTPWGYFD | | X | X | X | O56137 |
| 183 | 565 | PVEQSPQEPDSSSGI | | X | X | X | O56137 |
| 184 | 566 | ADGYLPDWLEDNLSE | | X | X | X | O56137 |
| 185 | 567 | GDSESVPDPQPLGEP | | X | X | X | O56137 |
| 186 | 568 | GEPVNAADAAALEHD | | X | X | X | O56137 |
| 187 | 569 | EDTSFGGNLGRAVFQ | | X | X | X | O56137 |
| 188 | 570 | GCLPPFPADVFMIPQ | | X | X | X | O56137 |
| 189 | 571 | PVPANPPAEFSATKF | | X | X | X | O56137 |
| 190 | 572 | SESVPDPQPLGEPPA | | X | X | X | O56137 |
| 191 | 573 | EFQERLQEDTSFGGN | | X | X | X | O56137 |
| 192 | 574 | DAAALEHDKAYDQQL | | X | X | X | O56137 |
| 193 | 575 | EPVNAADAAALEHDK | | X | X | X | O56137 |
| 194 | 576 | QRVSKTKTDNNNSNF | | X | X | X | O56137 |
| 195 | 577 | DSESVPDPQPLGEPP | | X | X | X | O56137 |
| 196 | 578 | EHDKAYDQQLKAGDN | | X | X | X | O56137 |
| 197 | 579 | LPGMVWQDRDVYLQG | | X | X | X | O56137 |
| 198 | 580 | VSVEIEWELQKENSK | | X | X | X | O56137 |
| 199 | 581 | DSEYQLPYVLGSAHQ | | X | X | X | O56137 |
| 200 | 582 | PQPLGEPPATPAAVG | | X | X | X | O56137 |
| 201 | 583 | VEIEWELQKENSKRW | | X | X | X | O56137 |
| 202 | 584 | EYFPSQMLRTGNNFT | | X | X | X | O56137 |
| 203 | 585 | PLIDQYLYYLNRTQN | | X | X | X | O56137 |
| 204 | 586 | QVSVEIEWELQKENS | | X | X | X | O56137 |
| 205 | 587 | ASNDNHYFGYSTPWG | | X | X | X | O56137 |
| 206 | 588 | EIKATNPVATERFGT | | X | X | X | O56137 |
| 207 | 589 | GSAHQGCLPPFPADV | | X | X | X | O56137 |
| 208 | 590 | SSSGIGKTGQQPAKK | | X | X | X | O56137 |
| 209 | 591 | AAALEHDKAYDQQLK | | X | X | X | O56137 |
| 210 | 592 | NNFQFSYTFEDVPFH | | X | X | X | O56139 |
| 211 | 593 | TGNNFQFSYTFEDVP | | X | X | X | O56139 |
| 212 | 594 | LRTGNNFQFSYTFED | | X | X | X | O56139 |
| 213 | 595 | EADAAALEHDKAYDQ | | X | X | X | O56139 |
| 214 | 596 | PQPLGEPPAAPTSLG | | X | X | X | O56139 |
| 215 | 597 | SSSGVGKSGKQPARK | | X | X | X | O56139 |
| 216 | 598 | DDEEKFFPMHGNLIF | | X | X | X | O56139 |
| 217 | 599 | QRLSKTANDNNNSNF | | X | X | X | O56139 |
| 218 | 600 | TTSGTTNQSRLLFSQ | | X | X | X | O56139 |
| 219 | 601 | SYEFENVPFHSSYAH | | X | X | X | Q6JC40 |
| 220 | 602 | QFSYEFENVPFHSSY | | X | X | X | Q6JC40 |
| 221 | 603 | ERLKEDTSFGGNLGR | | X | X | X | Q6JC40 |
| 222 | 604 | ESVPDPQPIGEPPAA | | X | X | X | Q6JC40 |
| 223 | 605 | NNVEFAVNTEGVYSE | | X | X | X | Q6JC40 |
| 224 | 606 | NEEEIKTTNPVATES | | X | X | X | Q6JC40 |
| 225 | 607 | SLIFGKQGTGRDNVD | | X | X | X | Q6JC40 |
| 226 | 608 | EDNLSEGIREWWALK | | X | X | X | Q6JC40 |
| 227 | 609 | NSFITQYSTGQVSVE | | X | X | X | Q6JC40 |
| 228 | 610 | SSNDNAYFGYSTPWG | | X | X | X | Q6JC40 |
| 229 | 611 | TPVPADPPTAFNKDK | | X | X | X | Q6JC40 |
| 230 | 612 | VEEAAKTAPGKKRPV | | X | X | X | Q6JC40 |
| 231 | 613 | IKNTPVPADPPTAFN | | X | X | X | Q6JC40 |
| 232 | 614 | IKTTNPVATESYGQV | | X | X | X | Q6JC40 |
| 233 | 615 | IQYTSNYYKSNNVEF | | X | X | X | Q6JC40 |
| 234 | 616 | QILIKNTPVPADPPT | | X | X | X | Q6JC40 |
| 235 | 617 | AFNKDKLNSFITQYS | | X | X | X | Q6JC40 |
| 236 | 618 | EYFPSQMLRTGNNFQ | | X | X | X | Q6JC40 |
| 237 | 619 | ITNEEEIKTTNPVAT | | X | X | X | Q6JC40 |
| 238 | 620 | LKEDTSFGGNLGRAV | | X | X | X | Q6JC40 |
| 239 | 621 | VATNHQSAQAQAQTG | | X | X | X | Q6JC40 |
| 240 | 622 | DADKVMITNEEEIKT | | X | X | X | Q6JC40 |
| 241 | 623 | SLTMASGGGAPVADN | | X | X | X | Q6JC40 |
| 242 | 624 | NKDKLNSFITQYSTG | | X | X | X | Q6JC40 |
| 243 | 625 | QPIGEPPAAPSGVGS | | X | X | X | Q6JC40 |
| 244 | 626 | DNADYSDVMLTSEEE | | X | X | X | Q8JQF8 |
| 245 | 627 | TYTFEDVPFHSSYAH | | X | X | X | Q8JQF8 |
| 246 | 628 | ARDNADYSDVMLTSE | | X | X | X | Q8JQF8 |
| 247 | 629 | IGTVNSQGALPGMVW | | X | X | X | Q8JQF8 |
| 248 | 630 | EEYGIVADNLQQQNT | | X | X | X | Q8JQF8 |
| 249 | 631 | QRVSTTTGQNNNSNF | | X | X | X | Q8JQF8 |
| 250 | 632 | DGVGSSSGNWHCDST | | X | X | X | Q8JQF8 |
| 251 | 633 | IKNTPVPADPPTTFN | | X | X | X | Q8JQF8 |
| 252 | 634 | ILIKNTPVPADPPTT | | X | X | X | Q8JQF8 |
| 253 | 635 | STIQVFTDSEYQLPY | | X | X | X | Q8JQF8 |
| 254 | 636 | CYRQQRVSTTTGQNN | | X | X | X | Q8JQF8 |
| 255 | 637 | HDKAYDQQLQAGDNP | | X | X | X | Q8JQF8 |
| 256 | 638 | LYYLSRTQTTGGTAN | | X | X | X | Q8JQF8 |
| 257 | 639 | TFNQSKLNSFITQYS | | X | X | X | Q8JQF8 |
| 258 | 640 | VTQNEGTKTIANNLT | | X | X | X | Q8JQF8 |
| 259 | 641 | QYLYYLSRTQTTGGT | | X | X | X | Q8JQF8 |
| 260 | 642 | SRTQTTGGTANTQTL | | X | X | X | Q8JQF8 |
| 261 | 643 | NTYFGYSTPWGYFDF | | X | X | X | Q8JQF8 |
| 262 | 644 | PVEPSPQRSPDSSTG | | X | X | X | Q8JQF8 |
| 263 | 645 | SVPDPQPLGEPPAAP | | X | X | X | Q8JQF8 |
| 264 | 646 | EPSPQRSPDSSTGIG | | X | X | X | Q8JQF8 |
| 265 | 647 | NNFEFTYNFEEVPFH | | X | X | X | Q9YIJ1 |
| 266 | 648 | PDWLEEVGEGLREFL | | X | X | X | Q9YIJ1 |
| 267 | 649 | TGNNFEFTYNFEEVP | | X | X | X | Q9YIJ1 |
| 268 | 650 | LRTGNNFEFTYNFEE | | X | X | X | Q9YIJ1 |
| 269 | 651 | EPVNRADEVAREHDI | | X | X | X | Q9YIJ1 |
| 270 | 652 | TEEDSKPSTSSDAEA | | X | X | X | Q9YIJ1 |
| 271 | 653 | TQYSTGQVTVEMEWE | | X | X | X | Q9YIJ1 |
| 272 | 654 | ESETQPVNRVAYNVG | | X | X | X | Q9YIJ1 |
| 273 | 655 | NLTSTVQVFTDDDYQ | | X | X | X | Q9YIJ1 |
| 274 | 656 | EIQYTNNYNDPQFVD | | X | X | X | Q9YIJ1 |
| 275 | 657 | PVPGNITSFSDVPVS | | X | X | X | Q9YIJ1 |
| 276 | 658 | TVEMEWELKKENSKR | | X | X | X | Q9YIJ1 |
| 277 | 659 | EFQEKLADDTSFGGN | | X | X | X | Q9YIJ1 |
| 278 | 660 | EQLEAGDNPYLKYNH | | X | X | X | Q9YIJ1 |
| 279 | 661 | NYNDPQFVDFAPDST | | X | X | X | Q9YIJ1 |
| 280 | 662 | SSLGADTMSAGGGGP | | X | X | X | Q9YIJ1 |
| 281 | 663 | SKPSTSSDAEAGPSG | | X | X | X | Q9YIJ1 |
| 282 | 664 | FITQYSTGQVTVEME | | X | X | X | Q9YIJ1 |
| 283 | 665 | EFLGLEAGPPKPKPN | | X | X | X | Q9YIJ1 |
| 284 | 666 | NVGGQMATNNQSSTT | | X | X | X | Q9YIJ1 |
| 285 | 667 | PSKMLRTGNNFEFTY | | X | X | X | Q9YIJ1 |
| 286 | 668 | VLEPFGLVEEGAKTA | | X | X | X | Q9YIJ1 |
| 287 | 669 | AQPASSLGADTMSAG | | X | X | X | Q9YIJ1 |
| 288 | 670 | VQDSTTTIANNLTST | | X | X | X | Q9YIJ1 |
| 289 | 671 | YLEGNMLITSESETQ | | X | X | X | Q9YIJ1 |
| 290 | 672 | NVDFAVNTDGTYSEP | | | X | X | AAO88201.1 |
| 291 | 673 | KDNVDYSSVMLTSEE | | | X | X | AAO88201.1 |
| 292 | 674 | HDDEERFFPSSGVLM | | | X | X | AAV-Rh74 c |
| 293 | 675 | SQMLRTGNFEFSYFE | | | X | X | AAV-Rh74 c |
| 294 | 676 | GDSESVPDPQPIGEP | | | X | X | AAV-Rh74 c |
| 295 | 677 | DNPYLRYHADAEFQE | | | X | X | AAV-Rh74 c |
| 296 | 678 | NTPVPADPPTTFNQA | | | X | X | AAV-Rh74 c |
| 297 | 679 | DSLVNPGVAMATHDD | | | X | X | AAV-Rh74 c |
| 298 | 680 | PLGLVESPVKTAPGK | | | X | X | AAV-Rh74 c |
| 299 | 681 | SRTQSTGGTAGTQQL | | | X | X | AAV-Rh74 c |
| 300 | 682 | TFNQAKLASFITQYS | | | X | X | AAV-Rh74 c |
| 301 | 683 | STTLSQNNNSNFAWT | | | X | X | AAV-Rh74 c |
| 302 | 684 | SSTGIGKKGQQPAKK | | | X | X | AAV-Rh74 c |
| 303 | 685 | KSTNVDFAVNTEGTY | | | X | X | AAV-Rh74 c |
| 304 | 686 | TYSEPRPIGTRYLTR | | | X | X | AAV-Rh74 c |
| 305 | 687 | EYGIVADNLQQQNLA | | | X | X | AOD99652.1 |
| 306 | 688 | RPATAPQIGTVNSQG | | | X | X | AOD99652.1 |
| 307 | 689 | GETTRPATAAQTQVV | | | X | X | AOD99656.1 |
| 308 | 690 | EYGIVSSNLQAANLA | | | X | X | AOD99656.1 |
| 309 | 691 | SNLQAANLALGETTR | | | X | X | AOD99656.1 |
| 310 | 692 | DADSVPDPQPIGEPP | | | X | X | pdb3J1QA |
| 311 | 693 | QGVLPGMVWQDRDVY | | | X | X | P03135 |
| 312 | 694 | NEADAAALEHDKAYD | | | X | X | P03135 |
| 313 | 695 | QGCLPPFPADVFMVP | | | X | X | P03135 |
| 314 | 696 | EHDKAYDRQLDSGDN | | | X | X | P03135 |
| 315 | 697 | PFPADVFMVPQYGYL | | | X | X | P03135 |
| 316 | 698 | EPVKTAPGKKRPVEH | | | X | X | P03135 |
| 317 | 699 | HKDDEEKFFPQSGVL | | | X | X | P03135 |
| 318 | 700 | DKGEPVNEADAAALE | | | X | X | P03135 |
| 319 | 701 | EQYGSVSTNLQRGNR | | | X | X | P03135 |
| 320 | 702 | GPPPPKPAERHKDDS | | | X | X | P03135 |
| 321 | 703 | IEKVMITDEEEIRTT | | | X | X | P03135 |
| 322 | 704 | KSVNVDFTVDTNGVY | | | X | X | P03135 |
| 323 | 705 | RPVEHSPVEPDSSSG | | | X | X | P03135 |
| 324 | 706 | SDIRDQSRNWLPGPC | | | X | X | P03135 |
| 325 | 707 | DNNEGADGVGNSSGN | | | X | X | P03135 |
| 326 | 708 | PVATEQYGSVSTNLQ | | | X | X | P03135 |
| 327 | 709 | QVKEVTQNDGTTTIA | | | X | X | P03135 |
| 328 | 710 | STVQVFTDSEYQLPY | | | X | X | P03135 |
| 329 | 711 | DADSVPDPQPLGQPP | | | X | X | P03135 |
| 330 | 712 | DSGDNPYLKYNHADA | | | X | X | P03135 |
| 331 | 713 | DSLVNPGPAMASHKD | | | X | X | P03135 |
| 332 | 714 | ISSQSGASNDNHYFG | | | X | X | P03135 |
| 333 | 715 | MITDEEEIRTTNPVA | | | X | X | P03135 |
| 334 | 716 | RQWWKLKPGPPPPKP | | | X | X | P03135 |
| 335 | 717 | VKEVTQNDGTTTIAN | | | X | X | P03135 |
| 336 | 718 | VTQNDGTTTIANNLT | | | X | X | P03135 |
| 337 | 719 | ADNNEGADGVGNSSG | | | X | X | P03135 |
| 338 | 720 | PLGLVEEPVKTAPGK | | | X | X | P03135 |
| 339 | 721 | GNNFTFSYTFEDVPF | | | X | X | O56137 |
| 340 | 722 | FSYTFEDVPFHSSYA | | | X | X | O56137 |
| 341 | 723 | TFSYTFEDVPFHSSY | | | X | X | O56137 |
| 342 | 724 | DDKDKFFPMSGVMIF | | | X | X | O56137 |
| 343 | 725 | TFEDVPFHSSYAHSQ | | | X | X | O56137 |
| 344 | 726 | TGDVHVMGALPGMVW | | | X | X | O56137 |
| 345 | 727 | HVMGALPGMVWQDRD | | | X | X | O56137 |
| 346 | 728 | TVAVNLQSSSTDPAT | | | X | X | O56137 |
| 347 | 729 | AVNLQSSSTDPATGD | | | X | X | O56137 |
| 348 | 730 | NHYFGYSTPWGYFDF | | | X | X | O56137 |
| 349 | 731 | GSQAVGRSSFYCLEY | | | X | X | O56137 |
| 350 | 732 | TQYSTGQVSVEIEWE | | | X | X | O56137 |
| 351 | 733 | YLPDWLEDNLSEGIR | | | X | X | O56137 |
| 352 | 734 | SNTALDNVMITDEEE | | | X | X | O56137 |
| 353 | 735 | TPWGYFDFNRFHCHF | | | X | X | O56137 |
| 354 | 736 | YFDFNRFHCHFSPRD | | | X | X | O56137 |
| 355 | 737 | GYLPDWLEDNLSEGI | | | X | X | O56137 |
| 356 | 738 | YSTGQVSVEIEWELQ | | | X | X | O56137 |
| 357 | 739 | SLDRLMNPLIDQYLY | | | X | X | O56137 |
| 358 | 740 | STVQVFSDSEYQLPY | | | X | X | O56137 |
| 359 | 741 | SVPDPQPLGEPPATP | | | X | X | O56137 |
| 360 | 742 | EFSATKFASFITQYS | | | X | X | O56137 |
| 361 | 743 | YSTPWGYFDFNRFHC | | | X | X | O56137 |
| 362 | 744 | AHQGCLPPFPADVFM | | | X | X | O56137 |
| 363 | 745 | ASFITQYSTGQVSVE | | | X | X | O56137 |
| 364 | 746 | EWWDLKPGAPKPKAN | | | X | X | O56137 |
| 365 | 747 | GEPPATPAAVGPTTM | | | X | X | O56137 |
| 366 | 748 | MVWQDRDVYLQGPIW | | | X | X | O56137 |
| 367 | 749 | DKGEPVNAADAAALE | | | X | X | O56137 |
| 368 | 750 | ERLQEDTSFGGNLGR | | | X | X | O56137 |
| 369 | 751 | EYQLPYVLGSAHQGC | | | X | X | O56137 |
| 370 | 752 | FITQYSTGQVSVEIE | | | X | X | O56137 |
| 371 | 753 | MITDEEEIKATNPVA | | | X | X | O56137 |
| 372 | 754 | AADAAALEHDKAYDQ | | | X | X | O56137 |
| 373 | 755 | AVGPTTMASGGGAPM | | | X | X | O56137 |
| 374 | 756 | DSTWLGDRVITTSTR | | | X | X | O56137 |
| 375 | 757 | ATPAAVGPTTMASGG | | | X | X | O56137 |
| 376 | 758 | DNNEGADGVGNASGN | | | X | X | O56137 |
| 377 | 759 | EQSPQEPDSSSGIGK | | | X | X | O56137 |
| 378 | 760 | FNIQVKEVTTNDGVT | | | X | X | O56137 |
| 379 | 761 | PAAVGPTTMASGGGA | | | X | X | O56137 |
| 380 | 762 | SSYAHSQSLDRLMNP | | | X | X | O56137 |
| 381 | 763 | TAPGKKRPVEQSPQE | | | X | X | O56137 |
| 382 | 764 | FHSSYAHSQSLDRLM | | | X | X | O56137 |
| 383 | 765 | FNGLDKGEPVNAADA | | | X | X | O56137 |
| 384 | 766 | HSSYAHSQSLDRLMN | | | X | X | O56137 |
| 385 | 767 | TTSTRTWALPTYNNH | | | X | X | O56137 |
| 386 | 768 | VKEVTTNDGVTTIAN | | | X | X | O56137 |
| 387 | 769 | DGVGNSSGNWHCDSQ | | | X | X | O56139 |
| 388 | 770 | NSSGNWHCDSQWLGD | | | X | X | O56139 |
| 389 | 771 | AKKRILEPLGLVEEA | | | X | X | O56139 |
| 390 | 772 | PVPANPPTTFSPAKF | | | X | X | O56139 |
| 391 | 773 | NNSNFPWTAASKYHL | | | X | X | O56139 |
| 392 | 774 | PDSSSGVGKSGKQPA | | | X | X | O56139 |
| 393 | 775 | QSSNTAPTTRTVNDQ | | | X | X | O56139 |
| 394 | 776 | TVANNLQSSNTAPTT | | | X | X | O56139 |
| 395 | 777 | AELDNVMITDEEEIR | | | X | X | O56139 |
| 396 | 778 | EEKFFPMHGNLIFGK | | | X | X | O56139 |
| 397 | 779 | GNNFQFSYEFENVPF | | | X | X | Q6JC40 |
| 398 | 780 | NVEFAVNTEGVYSEP | | | X | X | Q6JC40 |
| 399 | 781 | MLRTGNNFQFSYEFE | | | X | X | Q6JC40 |
| 400 | 782 | RTGNNFQFSYEFENV | | | X | X | Q6JC40 |
| 401 | 783 | STVQVFTDSDYQLPY | | | X | X | Q6JC40 |
| 402 | 784 | DGSQAVGRSSFYCLE | | | X | X | Q6JC40 |
| 403 | 785 | EFAVNTEGVYSEPRP | | | X | X | Q6JC40 |
| 404 | 786 | EFAWPGASSWALNGR | | | X | X | Q6JC40 |
| 405 | 787 | DTESVPDPQPIGEPP | | | X | X | Q6JC40 |
| 406 | 788 | NNNSEFAWPGASSWA | | | X | X | Q6JC40 |
| 407 | 789 | NTPVPADPPTAFNKD | | | X | X | Q6JC40 |
| 408 | 790 | STTVTQNNNSEFAWP | | | X | X | Q6JC40 |
| 409 | 791 | EIQYTSNYYKSNNVE | | | X | X | Q6JC40 |
| 410 | 792 | ENVPFHSSYAHSQSL | | | X | X | Q6JC40 |
| 411 | 793 | ILIKNTPVPADPPTA | | | X | X | Q6JC40 |
| 412 | 794 | RVSTTVRQNNNSEFA | | | X | X | Q6JC40 |
| 413 | 795 | SDYQLPYVLGSAHEG | | | X | X | Q6JC40 |
| 414 | 796 | GNGLDKGEPVNAADA | | | X | X | Q6JC40 |
| 415 | 797 | KSNNVEFAVNTEGVY | | | X | X | Q6JC40 |
| 416 | 798 | LNSFITQYSTGQVSV | | | X | X | Q6JC40 |
| 417 | 799 | QQTLKFSVAGPSNMA | | | X | X | Q6JC40 |
| 418 | 800 | SSGNWHCDSQWLGDR | | | X | X | Q6JC40 |
| 419 | 801 | ADNNEGADGVGSSSG | | | X | X | Q6JC40 |
| 420 | 802 | ASGGGAPVADNNEGA | | | X | X | Q6JC40 |
| 421 | 803 | IGEPPAAPSGVGSLT | | | X | X | Q6JC40 |
| 422 | 804 | PLGLVEEAAKTAPGK | | | X | X | Q6JC40 |
| 423 | 805 | SAGIGKSGAQPAKKR | | | X | X | Q6JC40 |
| 424 | 806 | ENSKRWNPEIQYTSN | | | X | X | Q6JC40 |
| 425 | 807 | ELQKENSKRWNPEIQ | | | X | X | Q6JC40 |
| 426 | 808 | GNNFQFTYTFEDVPF | | | X | X | Q8JQF8 |
| 427 | 809 | EERFFPSNGILIFGK | | | X | X | Q8JQF8 |
| 428 | 810 | PVATEEYGIVADNLQ | | | X | X | Q8JQF8 |
| 429 | 811 | QFTYRFEDVPFHSSY | | | X | X | Q8JQF8 |
| 430 | 812 | NTPVPADPPTTFNQS | | | X | X | Q8JQF8 |
| 431 | 813 | EIKTTNPVATEEYGI | | | X | X | Q8JQF8 |
| 432 | 814 | GSSSGNWHCDSTWLG | | | X | X | Q8JQF8 |
| 433 | 815 | RTGNNFQFTYTFEDV | | | X | X | Q8JQF8 |
| 434 | 816 | TNPVATEEYGIVADN | | | X | X | Q8JQF8 |
| 435 | 817 | TSEEEIKTTNPVATE | | | X | X | Q8JQF8 |
| 436 | 818 | GPCYRQQRVSTTTGQ | | | X | X | Q8JQF8 |
| 437 | 819 | LPGPCYRQQRVSTTT | | | X | X | Q8JQF8 |
| 438 | 820 | TTGGTANTQTLGFSQ | | | X | X | Q8JQF8 |
| 439 | 821 | KQISNGTSGGATNDN | | | X | X | Q8JQF8 |
| 440 | 822 | KQNAARDNADYSDVM | | | X | X | Q8JQF8 |
| 441 | 823 | NAARDNADYSDVMLT | | | X | X | Q8JQF8 |
| 442 | 824 | SKLNSFITQYSTGQV | | | X | X | Q8JQF8 |
| 443 | 825 | VKEVTQNEGTKTIAN | | | X | X | Q8JQF8 |
| 444 | 826 | VNSQGALPGMVWQNR | | | X | X | Q8JQF8 |
| 445 | 827 | NNSNFAWTAGTKYHL | | | X | X | Q8JQF8 |
| 446 | 828 | QQQNTAPQIGTVNSQ | | | X | X | Q8JQF8 |
| 447 | 829 | YNNHLYKQISNGTSG | | | X | X | Q8JQF8 |
| 448 | 830 | YSDVMLTSEEEIKTT | | | X | X | Q8JQF8 |
| 449 | 831 | DNTYFGYSTPWGYFD | | | X | X | Q8JQF8 |
| 450 | 832 | TYFGYSTPWGYFDFN | | | X | X | Q8JQF8 |
| 451 | 833 | ESVPDPQPLGEPPAA | | | X | X | Q8JQF8 |
| 452 | 834 | STGIGKKGQQPARKR | | | X | X | Q8JQF8 |
| 453 | 835 | FGYSTPWGYFDFNRF | | | X | X | Q9YIJ1 |
| 454 | 836 | YFGYSTPWGYFDFNR | | | X | X | Q9YIJ1 |
| 455 | 837 | NAYFGYSTPWGYFDF | | | X | X | Q9YIJ1 |
| 456 | 838 | HPPDWLEEVGEGLRE | | | X | X | Q9YIJ1 |
| 457 | 839 | TENPTERSSFFCLEY | | | X | X | Q9YIJ1 |
| 458 | 840 | WLEEVGEGLREFLGL | | | X | X | Q9YIJ1 |
| 459 | 841 | YSTGQVTVEMEWELK | | | X | X | Q9YIJ1 |
| 460 | 842 | FVDFAPDSTGEYRTT | | | X | X | Q9YIJ1 |
| 461 | 843 | QEIVPGSVWMERDVY | | | X | X | Q9YIJ1 |
| 462 | 844 | TPWGYFDFNRFHSHW | | | X | X | Q9YIJ1 |
| 463 | 845 | ANAYFGYSTPWGYFD | | | X | X | Q9YIJ1 |
| 464 | 846 | DDDYQLPYVVGNGTE | | | X | X | Q9YIJ1 |
| 465 | 847 | DEVAREHDISYNEQL | | | X | X | Q9YIJ1 |
| 466 | 848 | ELKKENSKRWNPEIQ | | | X | X | Q9YIJ1 |
| 467 | 849 | GNASGDWHCDSTWMG | | | X | X | Q9YIJ1 |
| 468 | 850 | GYNYLGPGNGLDRGE | | | X | X | Q9YIJ1 |
| 469 | 851 | TSFSDVPVSSFITQY | | | X | X | Q9YIJ1 |
| 470 | 852 | ANNLTSTVQVFTDDD | | | X | X | Q9YIJ1 |
| 471 | 853 | DQYLYRFVSTNNTGG | | | X | X | Q9YIJ1 |
| 472 | 854 | EYRTTRPIGTRYLTR | | | X | X | Q9YIJ1 |
| 473 | 855 | IFNIQVKEVTVQDST | | | X | X | Q9YIJ1 |
| 474 | 856 | ENSKRWNPEIQYTNN | | | X | X | Q9YIJ1 |
| 475 | 857 | AGPPKPKPNQQHQDQ | | | X | X | Q9YIJ1 |
| 476 | 858 | PSTSSDAEAGPSGSQ | | | X | X | Q9YIJ1 |
| 477 | 859 | TGQVTVEMEWELKKE | | | X | X | Q9YIJ1 |
| 478 | 860 | VKIFNIQVKEVTVQD | | | X | X | Q9YIJ1 |
| 479 | 861 | DSTTTIANNLTSTVQ | | | X | X | Q9YIJ1 |
| 480 | 862 | ISYNEQLEAGDNPYL | | | X | X | Q9YIJ1 |
| 481 | 863 | LGLEAGPPKPKPNQQ | | | X | X | Q9YIJ1 |
| 482 | 864 | TAPATGTYNLQEIVP | | | X | X | Q9YIJ1 |
| 483 | 865 | TMSAGGGGPLGDNNQ | | | X | X | Q9YIJ1 |
| 484 | 866 | FSYQFEDVPFHSSYA | | | | X | AAO88201.1 |
| 485 | 867 | VLMFGKQGAGKDNVD | | | | X | AAO88201.1 |
| 486 | 868 | DFAVNTDGTYSEPRP | | | | X | AAO88201.1 |
| 487 | 869 | DGTYSEPRPIGTRYL | | | | X | AAO88201.1 |
| 488 | 870 | GAVNSQGALPGMVWQ | | | | X | AAO88201.1 |
| 489 | 871 | QMLRTGNNFEFSYQF | | | | X | AAO88201.1 |
| 490 | 872 | MFGKQGAGKDNVDYS | | | | X | AAO88201.1 |
| 491 | 873 | APIVGAVNSQGALPG | | | | X | AAO88201.1 |
| 492 | 874 | IVGAVNSQGALPGMV | | | | X | AAO88201.1 |
| 493 | 875 | LQQQNAAPIVGAVNS | | | | X | AAO88201.1 |
| 494 | 876 | NTDGTYSEPRPIGTR | | | | X | AAO88201.1 |
| 495 | 877 | STNVDFAVNTDGTYS | | | | X | AAO88201.1 |
| 496 | 878 | KDDEERFFPSSGVLM | | | | X | AAO88201.1 |
| 497 | 879 | THKDDEERFFPSSGV | | | | X | AAO88201.1 |
| 498 | 880 | VNPGVAMATHKDDEE | | | | X | AAO88201.1 |
| 499 | 881 | KNTPVPADPPTTFSQ | | | | X | AAO88201.1 |
| 500 | 882 | MATHKDDEERFFPSS | | | | X | AAO88201.1 |
| 501 | 883 | NPVATEQYGVVADNL | | | | X | AAO88201.1 |
| 502 | 884 | PGVAMATHKDDEERF | | | | X | AAO88201.1 |
| 503 | 885 | RDSLVNPGVAMATHK | | | | X | AAO88201.1 |
| 504 | 886 | TTNPVATEQYGVVAD | | | | X | AAO88201.1 |
| 505 | 887 | VPADPPTTFSQAKLA | | | | X | AAO88201.1 |
| 506 | 888 | YFPSQMLRTGNNFEF | | | | X | AAO88201.1 |
| 507 | 889 | PSQMLRTGNNFEFSY | | | | X | AAO88201.1 |
| 508 | 890 | VLMFGKQGAGDNVDY | | | | X | AAV-Rh74 c |
| 509 | 891 | AGDNPYLRYHADAEF | | | | X | AAV-Rh74 c |
| 510 | 892 | AGDNVDYSSVMLTSE | | | | X | AAV-Rh74 c |
| 511 | 893 | FPSQMLRTGNFEFSY | | | | X | AAV-Rh74 c |
| 512 | 894 | IVGAVSQGALPGMVW | | | | X | AAV-Rh74 c |
| 513 | 895 | NWGFRPKRLNFLFNI | | | | X | AAV-Rh74 c |
| 514 | 896 | PVATEQYGWADNLQQ | | | | X | AAV-Rh74 c |
| 515 | 897 | EQYGWADNLQQQNAA | | | | X | AAV-Rh74 c |
| 516 | 898 | GPFNGLDKGEPVAAD | | | | X | AAV-Rh74 c |
| 517 | 899 | LVNPGVAMATHDDEE | | | | X | AAV-Rh74 c |
| 518 | 900 | LYYLSRTQSTGGTAG | | | | X | AAV-Rh74 c |
| 519 | 901 | NNMSAQAKNWLPGPC | | | | X | AAV-Rh74 c |
| 520 | 902 | YLGPFNGLDKGEPVA | | | | X | AAV-Rh74 c |
| 521 | 903 | ATEQYGWADNLQQQN | | | | X | AAV-Rh74 c |
| 522 | 904 | ATHDDEERFFPSSGV | | | | X | AAV-Rh74 c |
| 523 | 905 | CLEYFPSQMLRTGNF | | | | X | AAV-Rh74 c |
| 524 | 906 | DKGEPVAADAAALEH | | | | X | AAV-Rh74 c |
| 525 | 907 | FLFNIQVKEVTQNEG | | | | X | AAV-Rh74 c |
| 526 | 908 | GEPVAADAAALEHDK | | | | X | AAV-Rh74 c |
| 527 | 909 | LRYHADAEFQERLQE | | | | X | AAV-Rh74 c |
| 528 | 910 | NPGVAMATHDDEERF | | | | X | AAV-Rh74 c |
| 529 | 911 | PVAADAAALEHDKAY | | | | X | AAV-Rh74 c |
| 530 | 912 | QTGDSESVPDPQPIG | | | | X | AAV-Rh74 c |
| 531 | 913 | YHADAEFQERLQEDT | | | | X | AAV-Rh74 c |
| 532 | 914 | DPPTTFNQAKLASFI | | | | X | AAV-Rh74 c |
| 533 | 915 | GFRPKRLNFLFNIQV | | | | X | AAV-Rh74 c |
| 534 | 916 | GPNNMSAQAKNWLPG | | | | X | AAV-Rh74 c |
| 535 | 917 | GVAMATHDDEERFFP | | | | X | AAV-Rh74 c |
| 536 | 918 | KTTNPVATEQYGWAD | | | | X | AAV-Rh74 c |
| 537 | 919 | LEPLGLVESPVKTAP | | | | X | AAV-Rh74 c |
| 538 | 920 | LNFLFNIQVKEVTQN | | | | X | AAV-Rh74 c |
| 539 | 921 | NNNWGFRPKRLNFLF | | | | X | AAV-Rh74 c |
| 540 | 922 | PSSGVLMFGKQGAGD | | | | X | AAV-Rh74 c |
| 541 | 923 | PYLRYHADAEFQERL | | | | X | AAV-Rh74 c |
| 542 | 924 | RVLEPLGLVESPVKT | | | | X | AAV-Rh74 c |
| 543 | 925 | SPVKTAPGKKRPVEP | | | | X | AAV-Rh74 c |
| 544 | 926 | SQAGPNNMSAQAKNW | | | | X | AAV-Rh74 c |
| 545 | 927 | STGGTAGTQQLLFSQ | | | | X | AAV-Rh74 c |
| 546 | 928 | TGGTAGTQQLLFSQA | | | | X | AAV-Rh74 c |
| 547 | 929 | TNPVATEQYGWADNL | | | | X | AAV-Rh74 c |
| 548 | 930 | VESPVKTAPGKKRPV | | | | X | AAV-Rh74 c |
| 549 | 931 | VKTAPGKKRPVEPSP | | | | X | AAV-Rh74 c |
| 550 | 932 | VSQGALPGMVWQNRD | | | | X | AAV-Rh74 c |
| 551 | 933 | YLSRTQSTGGTAGTQ | | | | X | AAV-Rh74 c |
| 552 | 934 | YYLSRTQ$TGGTAGT | | | | X | AAV-Rh74 c |
| 553 | 935 | NMSAQAKNWLPGPCY | | | | X | AAV-Rh74 c |
| 554 | 936 | GEPPAGPSGLGSGTM | | | | X | AAV-Rh74 c |
| 555 | 937 | SEEEIKTTNPVATEQ | | | | X | AAV-Rh74 c |
| 556 | 938 | NVDYSSVMLTSEEEI | | | | X | AAV-Rh74 c |
| 557 | 939 | FAVNTEGTYSEPRPI | | | | X | AAV-Rh74 c |
| 558 | 940 | SNYYKSTNVDFAVNT | | | | X | AAV-Rh74 c |
| 559 | 941 | TEGTYSEPRPIGTRY | | | | X | AAV-Rh74 c |
| 560 | 942 | ERFFPSSGVLMFGKQ | | | | X | AAV-Rh74 c |
| 561 | 943 | HLYKQISNGTSGGST | | | | X | AAV-Rh74 c |
| 562 | 944 | IGKKGQQPAKKRLNF | | | | X | AAV-Rh74 c |
| 563 | 945 | MSAQAKNWLPGPCYR | | | | X | AAV-Rh74 c |
| 564 | 946 | PDPQPIGEPPAGPSG | | | | X | AAV-Rh74 c |
| 565 | 947 | QYLYYLSRTQ$TGGT | | | | X | AAV-Rh74 c |
| 566 | 948 | SVMLTSEEEIKTTNP | | | | X | AAV-Rh74 c |
| 567 | 949 | TLSQNNNSNFAWTGA | | | | X | AAV-Rh74 c |
| 568 | 950 | YYKSTNVDFAVNTEG | | | | X | AAV-Rh74 c |
| 569 | 951 | AGPSGLGSGTMAAGG | | | | X | AAV-Rh74 c |
| 570 | 952 | AQAKNWLPGPCYRQQ | | | | X | AAV-Rh74 c |
| 571 | 953 | CYRQQRVSTTLSQNN | | | | X | AAV-Rh74 c |
| 572 | 954 | DQYLYYLSRTQSTGG | | | | X | AAV-Rh74 c |
| 573 | 955 | DYSSVMLTSEEEIKT | | | | X | AAV-Rh74 c |
| 574 | 956 | GLGSGTMAAGGGAPM | | | | X | AAV-Rh74 c |
| 575 | 957 | GRDSLVNPGVAMATH | | | | X | AAV-Rh74 c |
| 576 | 958 | IDQYLYYLSRTQSTG | | | | X | AAV-Rh74 c |
| 577 | 959 | IQYTSNYYKSTNVDF | | | | X | AAV-Rh74 c |
| 578 | 960 | KKGQQPAKKRLNFGQ | | | | X | AAV-Rh74 c |
| 579 | 961 | KLASFITQYSTGQVS | | | | X | AAV-Rh74 c |
| 580 | 962 | KYHLNGRDSLVNPGV | | | | X | AAV-Rh74 c |
| 581 | 963 | LNGRDSLVNPGVAMA | | | | X | AAV-Rh74 c |
| 582 | 964 | NPEIQYTSNYYKSTN | | | | X | AAV-Rh74 c |
| 583 | 965 | PEIQYTSNYYKSTNV | | | | X | AAV-Rh74 c |
| 584 | 966 | PLIDQYLYYLSRTQS | | | | X | AAV-Rh74 c |
| 585 | 967 | QAKLASFITQYSTGQ | | | | X | AAV-Rh74 c |
| 586 | 968 | QISNGTSGGSTNDNT | | | | X | AAV-Rh74 c |
| 587 | 969 | QYTSNYYKSTNVDFA | | | | X | AAV-Rh74 c |
| 588 | 970 | RQQRVSTTLSQNNNS | | | | X | AAV-Rh74 c |
| 589 | 971 | SNGTSGGSTNDNTYF | | | | X | AAV-Rh74 c |
| 590 | 972 | SQNNNSNFAWTGATK | | | | X | AAV-Rh74 c |
| 591 | 973 | TGIGKKGQQPAKKRL | | | | X | AAV-Rh74 c |
| 592 | 974 | TSNYYKSTNVDFAVN | | | | X | AAV-Rh74 c |
| 593 | 975 | TTLSQNNNSNFAWTG | | | | X | AAV-Rh74 c |
| 594 | 976 | YKQISNGTSGGSTND | | | | X | AAV-Rh74 c |
| 595 | 977 | YRQQRVSTTLSQNNN | | | | X | AAV-Rh74 c |
| 596 | 978 | NNSNFAWTGATKYHL | | | | X | AAV-Rh74 c |
| 597 | 979 | GSTNDNTYFGYSTPW | | | | X | AAV-Rh74 c |
| 598 | 980 | DNGRGLVLPGYKYLG | | | | X | AAV-Rh74 c |
| 599 | 981 | NNNSNFAWTGATKYH | | | | X | AAV-Rh74 c |
| 600 | 982 | PKPKANQQKQDNGRG | | | | X | AAV-Rh74 c |
| 601 | 983 | QQKQDNGRGLVLPGY | | | | X | AAV-Rh74 c |
| 602 | 984 | SNFAWTGATKYHLNG | | | | X | AAV-Rh74 c |
| 603 | 985 | LAVPFKAQAQTGWVQ | | | | X | ALU85156.1 |
| 604 | 986 | QTLAVPFKAQAQTGW | | | | X | ALU85156.1 |
| 605 | 987 | SRTINGSGQNQQTLK | | | | X | ALU85156.1 |
| 606 | 988 | GETTRPARQAATADV | | | | X | AOD99651.1 |
| 607 | 989 | ALGETTRPARQAATA | | | | X | AOD99651.1 |
| 608 | 990 | GSVSTNLQRGNLALG | | | | X | AOD99651.1 |
| 609 | 991 | QYGSVSTNLQRGNLA | | | | X | AOD99651.1 |
| 610 | 992 | RPARQAATADVNTQG | | | | X | AOD99651.1 |
| 611 | 993 | TTRPARQAATADVNT | | | | X | AOD99651.1 |
| 612 | 994 | DNLQQQNLALGETTR | | | | X | AOD99652.1 |
| 613 | 995 | GETTRPATAPQIGTV | | | | X | AOD99652.1 |
| 614 | 996 | GIVADNLQQQNLALG | | | | X | AOD99652.1 |
| 615 | 997 | VADNLQQQNLALGET | | | | X | AOD99652.1 |
| 616 | 998 | RPATQAQTGLVHNQG | | | | X | AOD99654.1 |
| 617 | 999 | VADNLQQLALGETTR | | | | X | AOD99655.1 |
| 618 | 1000 | GETTRPAANTGPIVG | | | | X | AOD99655.1 |
| 619 | 1001 | RPAANTGPIVGNVNS | | | | X | AOD99655.1 |
| 620 | 1002 | TEQYGWADNLQQLA | | | | X | AOD99655.1 |
| 621 | 1003 | TTRPAANTGPIVGNV | | | | X | AOD99655.1 |
| 622 | 1004 | VSSNLQAANLALGET | | | | X | AOD99656.1 |
| 623 | 1005 | GIVSSNLQAANLALG | | | | X | AOD99656.1 |
| 624 | 1006 | RPATAAQTQVVNNQG | | | | X | AOD99656.1 |
| 625 | 1007 | GETTRPASTTAPATG | | | | X | AOD99659.1 |
| 626 | 1008 | SLALGETTRPASTTA | | | | X | AOD99659.1 |
| 627 | 1009 | TTRPASTTAPATGTY | | | | X | AOD99659.1 |
| 628 | 1010 | VGGQMATNNQSLALG | | | | X | AOD99659.1 |
| 629 | 1011 | EAAKTAPGKKRPVEH | | | | X | pdb3J1QA |
| 630 | 1012 | APSGVGSLTMAAGGG | | | | X | pdb3J1QA |
| 631 | 1013 | GGTTNTQTLGFSQGG | | | | X | pdb3J1QA |
| 632 | 1014 | VGSLTMAAGGGAPMA | | | | X | pdb3J1QA |
| 633 | 1015 | GADGVGNSSGNWHCD | | | | X | P03135 |
| 634 | 1016 | ADAAALEHDKAYDRQ | | | | X | P03135 |
| 635 | 1017 | CLPPFPADVFMVPQY | | | | X | P03135 |
| 636 | 1018 | DKAYDRQLDSGDNPY | | | | X | P03135 |
| 637 | 1019 | EGADGVGNSSGNWHC | | | | X | P03135 |
| 638 | 1020 | NNEGADGVGNSSGNW | | | | X | P03135 |
| 639 | 1021 | YLPDWLEDTLSEGIR | | | | X | P03135 |
| 640 | 1022 | ALEHDKAYDRQLDSG | | | | X | P03135 |
| 641 | 1023 | DVNTQGVLPGMVWQD | | | | X | P03135 |
| 642 | 1024 | GPAMASHKDDEEKFF | | | | X | P03135 |
| 643 | 1025 | LPPFPADVFMVPQYG | | | | X | P03135 |
| 644 | 1026 | QRVSKTSADNNNSEY | | | | X | P03135 |
| 645 | 1027 | AADGYLPDWLEDTLS | | | | X | P03135 |
| 646 | 1028 | SSGNWHCDSTWMGDR | | | | X | P03135 |
| 647 | 1029 | FPADVFMVPQYGYLT | | | | X | P03135 |
| 648 | 1030 | GPFNGLDKGEPVNEA | | | | X | P03135 |
| 649 | 1031 | GVGNSSGNWHCDSTW | | | | X | P03135 |
| 650 | 1032 | NNLTSTVQVFTDSEY | | | | X | P03135 |
| 651 | 1033 | NPGPAMASHKDDEEK | | | | X | P03135 |
| 652 | 1034 | TAPGKKRPVEHSPVE | | | | X | P03135 |
| 653 | 1035 | VLPGMVWQDRDVYLQ | | | | X | P03135 |
| 654 | 1036 | VSKTSADNNNSEYSW | | | | X | P03135 |
| 655 | 1037 | AMASHKDDEEKFFPQ | | | | X | P03135 |
| 656 | 1038 | ATEQYGSVSTNLQRG | | | | X | P03135 |
| 657 | 1039 | DNNNSEYSWTGATKY | | | | X | P03135 |
| 658 | 1040 | DSVPDPQPLGQPPAA | | | | X | P03135 |
| 659 | 1041 | EKTNVDIEKVMITDE | | | | X | P03135 |
| 660 | 1042 | EVTQNDGTTTIANNL | | | | X | P03135 |
| 661 | 1043 | GNWHCDSTWMGDRVI | | | | X | P03135 |
| 662 | 1044 | KKRPVEHSPVEPDSS | | | | X | P03135 |
| 663 | 1045 | KPGPPPPKPAERHKD | | | | X | P03135 |
| 664 | 1046 | KTSADNNNSEYSWTG | | | | X | P03135 |
| 665 | 1047 | NEGADGVGNSSGNWH | | | | X | P03135 |
| 666 | 1048 | NLTSTVQVFTDSEYQ | | | | X | P03135 |
| 667 | 1049 | NTQGVLPGMVWQDRD | | | | X | P03135 |
| 668 | 1050 | RLNFGQTGDADSVPD | | | | X | P03135 |
| 669 | 1051 | SRLQFSQAGASDIRD | | | | X | P03135 |
| 670 | 1052 | TVQVFTDSEYQLPYV | | | | X | P03135 |
| 671 | 1053 | VQVFTDSEYQLPYVL | | | | X | P03135 |
| 672 | 1054 | WLEDTLSEGIRQWWK | | | | X | P03135 |
| 673 | 1055 | YNKSVNVDFTVDTNG | | | | X | P03135 |
| 674 | 1056 | ADGVGNSSGNWHCDS | | | | X | P03135 |
| 675 | 1057 | ADVFMVPQYGYLTLN | | | | X | P03135 |
| 676 | 1058 | ANNLTSTVQVFTDSE | | | | X | P03135 |
| 677 | 1059 | APSGLGTNTMATGSG | | | | X | P03135 |
| 678 | 1060 | FKLFNIQVKEVTQND | | | | X | P03135 |
| 679 | 1061 | GCLPPFPADVFMVPQ | | | | X | P03135 |
| 680 | 1062 | GIRQWWKLKPGPPPP | | | | X | P03135 |
| 681 | 1063 | GLDKGEPVNEADAAA | | | | X | P03135 |
| 682 | 1064 | KKRVLEPLGLVEEPV | | | | X | P03135 |
| 683 | 1065 | KQGSEKTNVDIEKVM | | | | X | P03135 |
| 684 | 1066 | KVMITDEEEIRTTNP | | | | X | P03135 |
| 685 | 1067 | LTSTVQVFTDSEYQL | | | | X | P03135 |
| 686 | 1068 | MADNNEGADGVGNSS | | | | X | P03135 |
| 687 | 1069 | PARKRLNFGQTGDAD | | | | X | P03135 |
| 688 | 1070 | PPPKPAERHKDDSRG | | | | X | P03135 |
| 689 | 1071 | SADNNNSEYSWTGAT | | | | X | P03135 |
| 690 | 1072 | TLSEGIRQWWKLKPG | | | | X | P03135 |
| 691 | 1073 | TNGVYSEPRPIGTRY | | | | X | P03135 |
| 692 | 1074 | TNTPSGTTTQSRLQF | | | | X | P03135 |
| 693 | 1075 | WMGDRVITTSTRTWA | | | | X | P03135 |
| 694 | 1076 | AATADVNTQGVLPGM | | | | X | P03135 |
| 695 | 1077 | AYDRQLDSGDNPYLK | | | | X | P03135 |
| 696 | 1078 | CDSTWMGDRVITTST | | | | X | P03135 |
| 697 | 1079 | DDSRGLVLPGYKYLG | | | | X | P03135 |
| 698 | 1080 | DPQPLGQPPAAPSGL | | | | X | P03135 |
| 699 | 1081 | EIRTTNPVATEQYGS | | | | X | P03135 |
| 700 | 1082 | FGKQGSEKTNVDIEK | | | | X | P03135 |
| 701 | 1083 | FTVDTNGVYSEPRPI | | | | X | P03135 |
| 702 | 1084 | GASDIRDQSRNWLPG | | | | X | P03135 |
| 703 | 1085 | GLVEEPVKTAPGKKR | | | | X | P03135 |
| 704 | 1086 | GNRQAATADVNTQGV | | | | X | P03135 |
| 705 | 1087 | GQTGDADSVPDPQPL | | | | X | P03135 |
| 706 | 1088 | GRDSLVNPGPAMASH | | | | X | P03135 |
| 707 | 1089 | GSGAPMADNNEGADG | | | | X | P03135 |
| 708 | 1090 | GVLIFGKQGSEKTNV | | | | X | P03135 |
| 709 | 1091 | HSPVEPDSSSGTGKA | | | | X | P03135 |
| 710 | 1092 | IQVKEVTQNDGTTTI | | | | X | P03135 |
| 711 | 1093 | IRDQSRNWLPGPCYR | | | | X | P03135 |
| 712 | 1094 | KEVTQNDGTTTIANN | | | | X | P03135 |
| 713 | 1095 | KGEPVNEADAAALEH | | | | X | P03135 |
| 714 | 1096 | KLFNIQVKEVTQNDG | | | | X | P03135 |
| 715 | 1097 | KLKPGPPPPKPAERH | | | | X | P03135 |
| 716 | 1098 | LEPLGLVEEPVKTAP | | | | X | P03135 |
| 717 | 1099 | LIFGKQGSEKTNVDI | | | | X | P03135 |
| 718 | 1100 | LNFKLFNIQVKEVTQ | | | | X | P03135 |
| 719 | 1101 | NFGQTGDADSVPDPQ | | | | X | P03135 |
| 720 | 1102 | NLQRGNRQAATADVN | | | | X | P03135 |
| 721 | 1103 | NTPVPANPSTTFSAA | | | | X | P03135 |
| 722 | 1104 | PAAPSGLGTNTMATG | | | | X | P03135 |
| 723 | 1105 | PAERHKDDSRGLVLP | | | | X | P03135 |
| 724 | 1106 | PGKKRPVEHSPVEPD | | | | X | P03135 |
| 725 | 1107 | PLIDQYLYYLSRTNT | | | | X | P03135 |
| 726 | 1108 | PMADNNEGADGVGNS | | | | X | P03135 |
| 727 | 1109 | PQILIKNTPVPANPS | | | | X | P03135 |
| 728 | 1110 | QAGASDIRDQSRNWL | | | | X | P03135 |
| 729 | 1111 | QISSQSGASNDNHYF | | | | X | P03135 |
| 730 | 1112 | QRGNRQAATADVNTQ | | | | X | P03135 |
| 731 | 1113 | QSGVLIFGKQGSEKT | | | | X | P03135 |
| 732 | 1114 | RKRLNFGQTGDADSV | | | | X | P03135 |
| 733 | 1115 | RQQRVSKTSADNNNS | | | | X | P03135 |
| 734 | 1116 | RTTNPVATEQYGSVS | | | | X | P03135 |
| 735 | 1117 | RVLEPLGLVEEPVKT | | | | X | P03135 |
| 736 | 1118 | SAAKFASFITQYSTG | | | | X | P03135 |
| 737 | 1119 | SEYSWTGATKYHLNG | | | | X | P03135 |
| 738 | 1120 | SGTTTQSRLQFSQAG | | | | X | P03135 |
| 739 | 1121 | SRGLVLPGYKYLGPF | | | | X | P03135 |
| 740 | 1122 | SSGTGKAGQQPARKR | | | | X | P03135 |
| 741 | 1123 | TFSAAKFASFITQYS | | | | X | P03135 |
| 742 | 1124 | TGDADSVPDPQPLGQ | | | | X | P03135 |
| 743 | 1125 | TNPVATEQYGSVSTN | | | | X | P03135 |
| 744 | 1126 | VFMVPQYGYLTLNNG | | | | X | P03135 |
| 745 | 1127 | VNEADAAALEHDKAY | | | | X | P03135 |
| 746 | 1128 | VPDPQPLGQPPAAPS | | | | X | P03135 |
| 747 | 1129 | WWKLKPGPPPPKPAE | | | | X | P03135 |
| 748 | 1130 | GATKYHLNGRDSLVN | | | | X | P03135 |
| 749 | 1131 | NFTFSYTFEDVPFHS | | | | X | O56137 |
| 750 | 1132 | RTGNNFTFSYTFEDV | | | | X | O56137 |
| 751 | 1133 | EPFGLVEEGAKTAPG | | | | X | O56137 |
| 752 | 1134 | PVATERFGTVAVNLQ | | | | X | O56137 |
| 753 | 1135 | DVHVMGALPGMVWQD | | | | X | O56137 |
| 754 | 1136 | ERFGTVAVNLQSSST | | | | X | O56137 |
| 755 | 1137 | MGGFGLKHPPPQILI | | | | X | O56137 |
| 756 | 1138 | AMASHKDDKDKFFPM | | | | X | O56137 |
| 757 | 1139 | DVPFHSSYAHSQSLD | | | | X | O56137 |
| 758 | 1140 | FGTVAVNLQSSSTDP | | | | X | O56137 |
| 759 | 1141 | FHPSPLMGGFGLKHP | | | | X | O56137 |
| 760 | 1142 | GLKHPPPQILIKNTP | | | | X | O56137 |
| 761 | 1143 | GRAVFQAKKRVLEPF | | | | X | O56137 |
| 762 | 1144 | HPSPLMGGFGLKHPP | | | | X | O56137 |
| 763 | 1145 | KDKFFPMSGVMIFGK | | | | X | O56137 |
| 764 | 1146 | KHPPPQILIKNTPVP | | | | X | O56137 |
| 765 | 1147 | LMGGFGLKHPPPQIL | | | | X | O56137 |
| 766 | 1148 | NLQSSSTDPATGDVH | | | | X | O56137 |
| 767 | 1149 | PSPLMGGFGLKHPPP | | | | X | O56137 |
| 768 | 1150 | TDPATGDVHVMGALP | | | | X | O56137 |
| 769 | 1151 | LPPFPADVFMIPQYG | | | | X | O56137 |
| 770 | 1152 | FDFNRFHCHFSPRDW | | | | X | O56137 |
| 771 | 1153 | PPFPADVFMIPQYGY | | | | X | O56137 |
| 772 | 1154 | HYFGYSTPWGYFDFN | | | | X | O56137 |
| 773 | 1155 | CLPPFPADVFMIPQY | | | | X | O56137 |
| 774 | 1156 | NNLTSTVQVFSDSEY | | | | X | O56137 |
| 775 | 1157 | SQAVGRSSFYCLEYF | | | | X | O56137 |
| 776 | 1158 | DNLSEGIREWWDLKP | | | | X | O56137 |
| 777 | 1159 | LDRLMNPLIDQYLYY | | | | X | O56137 |
| 778 | 1160 | PFPADVFMIPQYGYL | | | | X | O56137 |
| 779 | 1161 | QAVGRSSFYCLEYFP | | | | X | O56137 |
| 780 | 1162 | QGCLPPFPADVFMIP | | | | X | O56137 |
| 781 | 1163 | GADGVGNASGNWHCD | | | | X | O56137 |
| 782 | 1164 | NLSEGIREWWDLKPG | | | | X | O56137 |
| 783 | 1165 | RSSFYCLEYFPSQML | | | | X | O56137 |
| 784 | 1166 | TDGHFHPSPLMGGFG | | | | X | O56137 |
| 785 | 1167 | VDFTVDNNGLYTEPR | | | | X | O56137 |
| 786 | 1168 | AADGYLPDWLEDNLS | | | | X | O56137 |
| 787 | 1169 | ANVDFTVDNNGLYTE | | | | X | O56137 |
| 788 | 1170 | FPADVFMIPQYGYLT | | | | X | O56137 |
| 789 | 1171 | LPDWLEDNLSEGIRE | | | | X | O56137 |
| 790 | 1172 | MAADGYLPDWLEDNL | | | | X | O56137 |
| 791 | 1173 | SNDNHYFGYSTPWGY | | | | X | O56137 |
| 792 | 1174 | VLPGYKYLGPFNGLD | | | | X | O56137 |
| 793 | 1175 | WGYFDFNRFHCHFSP | | | | X | O56137 |
| 794 | 1176 | EVTTNDGVTTIANNL | | | | X | O56137 |
| 795 | 1177 | GNWHCDSTWLGDRVI | | | | X | O56137 |
| 796 | 1178 | NDNHYFGYSTPWGYF | | | | X | O56137 |
| 797 | 1179 | PAEFSATKFASFITQ | | | | X | O56137 |
| 798 | 1180 | PYLRYNHADAEFQER | | | | X | O56137 |
| 799 | 1181 | YNHADAEFQERLQED | | | | X | O56137 |
| 800 | 1182 | DFNRFHCHFSPRDWQ | | | | X | O56137 |
| 801 | 1183 | DNPYLRYNHADAEFQ | | | | X | O56137 |
| 802 | 1184 | DRLMNPLIDQYLYYL | | | | X | O56137 |
| 803 | 1185 | GRSSFYCLEYFPSQM | | | | X | O56137 |
| 804 | 1186 | HQGCLPPFPADVFMI | | | | X | O56137 |
| 805 | 1187 | MGALPGMVWQDRDVY | | | | X | O56137 |
| 806 | 1188 | PHTDGHFHPSPLMGG | | | | X | O56137 |
| 807 | 1189 | QTGDSESVPDPQPLG | | | | X | O56137 |
| 808 | 1190 | SVEIEWELQKENSKR | | | | X | O56137 |
| 809 | 1191 | VGRSSFYCLEYFPSQ | | | | X | O56137 |
| 810 | 1192 | VQVFSDSEYQLPYVL | | | | X | O56137 |
| 811 | 1193 | YKYLGPFNGLDKGEP | | | | X | O56137 |
| 812 | 1194 | DGVGNASGNWHCDST | | | | X | O56137 |
| 813 | 1195 | GDNPYLRYNHADAEF | | | | X | O56137 |
| 814 | 1196 | GGGAPMADNNEGADG | | | | X | O56137 |
| 815 | 1197 | GQVSVEIEWELQKEN | | | | X | O56137 |
| 816 | 1198 | KGEPVNAADAAALEH | | | | X | O56137 |
| 817 | 1199 | LGPFNGLDKGEPVNA | | | | X | O56137 |
| 818 | 1200 | LTSTVQVFSDSEYQL | | | | X | O56137 |
| 819 | 1201 | NASGNWHCDSTWLGD | | | | X | O56137 |
| 820 | 1202 | NNGLYTEPRPIGTRY | | | | X | O56137 |
| 821 | 1203 | PDPQPLGEPPATPAA | | | | X | O56137 |
| 822 | 1204 | QSLDRLMNPLIDQYL | | | | X | O56137 |
| 823 | 1205 | SQSLDRLMNPLIDQY | | | | X | O56137 |
| 824 | 1206 | VEEGAKTAPGKKRPV | | | | X | O56137 |
| 825 | 1207 | ADAEFQERLQEDTSF | | | | X | O56137 |
| 826 | 1208 | ADVFMIPQYGYLTLN | | | | X | O56137 |
| 827 | 1209 | GMVWQDRDVYLQGPI | | | | X | O56137 |
| 828 | 1210 | IDQYLYYLNRTQNQS | | | | X | O56137 |
| 829 | 1211 | KLFNIQVKEVTTNDG | | | | X | O56137 |
| 830 | 1212 | KRPVEQSPQEPDSSS | | | | X | O56137 |
| 831 | 1213 | KTKTDNNNSNFTWTG | | | | X | O56137 |
| 832 | 1214 | KYLGPFNGLDKGEPV | | | | X | O56137 |
| 833 | 1215 | NAADAAALEHDKAYD | | | | X | O56137 |
| 834 | 1216 | NTPVPANPPAEFSAT | | | | X | O56137 |
| 835 | 1217 | PVNAADAAALEHDKA | | | | X | O56137 |
| 836 | 1218 | PWGYFDFNRFHCHFS | | | | X | O56137 |
| 837 | 1219 | QEDTSFGGNLGRAVF | | | | X | O56137 |
| 838 | 1220 | SAHQGCLPPFPADVF | | | | X | O56137 |
| 839 | 1221 | SGGGAPMADNNEGAD | | | | X | O56137 |
| 840 | 1222 | TGQVSVEIEWELQKE | | | | X | O56137 |
| 841 | 1223 | VFSDSEYQLPYVLGS | | | | X | O56137 |
| 842 | 1224 | VSKTKTDNNNSNFTW | | | | X | O56137 |
| 843 | 1225 | VWQDRDVYLQGPIWA | | | | X | O56137 |
| 844 | 1226 | YLGPFNGLDKGEPVN | | | | X | O56137 |
| 845 | 1227 | AALEHDKAYDQQLKA | | | | X | O56137 |
| 846 | 1228 | ADAAALEHDKAYDQQ | | | | X | O56137 |
| 847 | 1229 | AEFQERLQEDTSFGG | | | | X | O56137 |
| 848 | 1230 | AVGRSSFYCLEYFPS | | | | X | O56137 |
| 849 | 1231 | DDGRGLVLPGYKYLG | | | | X | O56137 |
| 850 | 1232 | DNNNSNFTWTGASKY | | | | X | O56137 |
| 851 | 1233 | ESIINPGTAMASHKD | | | | X | O56137 |
| 852 | 1234 | FGQTGDSESVPDPQP | | | | X | O56137 |
| 853 | 1235 | FNRFHCHFSPRDWQR | | | | X | O56137 |
| 854 | 1236 | FQERLQEDTSFGGNL | | | | X | O56137 |
| 855 | 1237 | FRPKRLNFKLFNIQV | | | | X | O56137 |
| 856 | 1238 | FSPRDWQRLINNNWG | | | | X | O56137 |
| 857 | 1239 | FTVDNNGLYTEPRPI | | | | X | O56137 |
| 858 | 1240 | FTWTGASKYNLNGRE | | | | X | O56137 |
| 859 | 1241 | GAPKPKANQQKQDDG | | | | X | O56137 |
| 860 | 1242 | GAPMADNNEGADGVG | | | | X | O56137 |
| 861 | 1243 | GASNTALDNVMITDE | | | | X | O56137 |
| 862 | 1244 | GHFHPSPLMGGFGLK | | | | X | O56137 |
| 863 | 1245 | GLDKGEPVNAADAAA | | | | X | O56137 |
| 864 | 1246 | GRGLVLPGYKYLGPF | | | | X | O56137 |
| 865 | 1247 | GYFDFNRFHCHFSPR | | | | X | O56137 |
| 866 | 1248 | GYKYLGPFNGLDKGE | | | | X | O56137 |
| 867 | 1249 | IEWELQKENSKRWNP | | | | X | O56137 |
| 868 | 1250 | IREWWDLKPGAPKPK | | | | X | O56137 |
| 869 | 1251 | KIPHTDGHFHPSPLM | | | | X | O56137 |
| 870 | 1252 | KKRPVEQSPQEPDSS | | | | X | O56137 |
| 871 | 1253 | KQDDGRGLVLPGYKY | | | | X | O56137 |
| 872 | 1254 | KTDNNNSNFTWTGAS | | | | X | O56137 |
| 873 | 1255 | LDKGEPVNAADAAAL | | | | X | O56137 |
| 874 | 1256 | LEHDKAYDQQLKAGD | | | | X | O56137 |
| 875 | 1257 | LEYFPSQMLRTGNNF | | | | X | O56137 |
| 876 | 1258 | LKPGAPKPKANQQKQ | | | | X | O56137 |
| 877 | 1259 | MASGGGAPMADNNEG | | | | X | O56137 |
| 878 | 1260 | NEGADGVGNASGNWH | | | | X | O56137 |
| 879 | 1261 | NGLDKGEPVNAADAA | | | | X | O56137 |
| 880 | 1262 | NGSQAVGRSSFYCLE | | | | X | O56137 |
| 881 | 1263 | NNSNFTWTGASKYNL | | | | X | O56137 |
| 882 | 1264 | NNWGFRPKRLNFKLF | | | | X | O56137 |
| 883 | 1265 | NPYLRYNHADAEFQE | | | | X | O56137 |
| 884 | 1266 | NVMITDEEEIKATNP | | | | X | O56137 |
| 885 | 1267 | NWGFRPKRLNFKLFN | | | | X | O56137 |
| 886 | 1268 | PADVFMIPQYGYLTL | | | | X | O56137 |
| 887 | 1269 | PDSSSGIGKTGQQPA | | | | X | O56137 |
| 888 | 1270 | PFNGLDKGEPVNAAD | | | | X | O56137 |
| 889 | 1271 | PGKKRPVEQSPQEPD | | | | X | O56137 |
| 890 | 1272 | PGYKYLGPFNGLDKG | | | | X | O56137 |
| 891 | 1273 | PIWAKIPHTDGHFHP | | | | X | O56137 |
| 892 | 1274 | PQILIKNTPVPANPP | | | | X | O56137 |
| 893 | 1275 | QEPDSSSGIGKTGQQ | | | | X | O56137 |
| 894 | 1276 | QISSASTGASNDNHY | | | | X | O56137 |
| 895 | 1277 | QQKQDDGRGLVLPGY | | | | X | O56137 |
| 896 | 1278 | REWWDLKPGAPKPKA | | | | X | O56137 |
| 897 | 1279 | RLMNPLIDQYLYYLN | | | | X | O56137 |
| 898 | 1280 | RLNFKLFNIQVKEVT | | | | X | O56137 |
| 899 | 1281 | SEYQLPYVLGSAHQG | | | | X | O56137 |
| 900 | 1282 | SGNWHCDSTWLGDRV | | | | X | O56137 |
| 901 | 1283 | SPRDWQRLINNNWGF | | | | X | O56137 |
| 902 | 1284 | STGQVSVEIEWELQK | | | | X | O56137 |
| 903 | 1285 | STPWGYFDFNRFHCH | | | | X | O56137 |
| 904 | 1286 | TALDNVMITDEEEIK | | | | X | O56137 |
| 905 | 1287 | TGDSESVPDPQPLGE | | | | X | O56137 |
| 906 | 1288 | VGNASGNWHCDSTWL | | | | X | O56137 |
| 907 | 1289 | WAKIPHTDGHFHPSP | | | | X | O56137 |
| 908 | 1290 | WELQKENSKRWNPEV | | | | X | O56137 |
| 909 | 1291 | YTEPRPIGTRYLTRP | | | | X | O56137 |
| 910 | 1292 | AGMSVQPKNWLPGPC | | | | X | O56137 |
| 911 | 1293 | AHSQSLDRLMNPLID | | | | X | O56137 |
| 912 | 1294 | APGKKRPVEQSPQEP | | | | X | O56137 |
| 913 | 1295 | APKPKANQQKQDDGR | | | | X | O56137 |
| 914 | 1296 | CDSTWLGDRVITTST | | | | X | O56137 |
| 915 | 1297 | CLEYFPSQMLRTGNN | | | | X | O56137 |
| 916 | 1298 | DGRGLVLPGYKYLGP | | | | X | O56137 |
| 917 | 1299 | DKAYDQQLKAGDNPY | | | | X | O56137 |
| 918 | 1300 | DQQLKAGDNPYLRYN | | | | X | O56137 |
| 919 | 1301 | DRDVYLQGPIWAKIP | | | | X | O56137 |
| 920 | 1302 | FPSQMLRTGNNFTFS | | | | X | O56137 |
| 921 | 1303 | GASKYNLNGRESIIN | | | | X | O56137 |
| 922 | 1304 | GDRVITTSTRTWALP | | | | X | O56137 |
| 923 | 1305 | GFRPKRLNFKLFNIQ | | | | X | O56137 |
| 924 | 1306 | GIREWWDLKPGAPKP | | | | X | O56137 |
| 925 | 1307 | GLVEEGAKTAPGKKR | | | | X | O56137 |
| 926 | 1308 | GLVLPGYKYLGPFNG | | | | X | O56137 |
| 927 | 1309 | GLYTEPRPIGTRYLT | | | | X | O56137 |
| 928 | 1310 | GNLGRAVFQAKKRVL | | | | X | O56137 |
| 929 | 1311 | GQTGDSESVPDPQPL | | | | X | O56137 |
| 930 | 1312 | GRESIINPGTAMASH | | | | X | O56137 |
| 931 | 1313 | HADAEFQERLQEDTS | | | | X | O56137 |
| 932 | 1314 | HFSPRDWQRLINNNW | | | | X | O56137 |
| 933 | 1315 | IKNTPVPANPPAEFS | | | | X | O56137 |
| 934 | 1316 | KANQQKQDDGRGLVL | | | | X | O56137 |
| 935 | 1317 | KPGAPKPKANQQKQD | | | | X | O56137 |
| 936 | 1318 | KPKANQQKQDDGRGL | | | | X | O56137 |
| 937 | 1319 | KRLNFGQTGDSESVP | | | | X | O56137 |
| 938 | 1320 | LDNVMITDEEEIKAT | | | | X | O56137 |
| 939 | 1321 | LGRAVFQAKKRVLEP | | | | X | O56137 |
| 940 | 1322 | LNFGQTGDSESVPDP | | | | X | O56137 |
| 941 | 1323 | LNGRESIINPGTAMA | | | | X | O56137 |
| 942 | 1324 | LNNGSQAVGRSSFYC | | | | X | O56137 |
| 943 | 1325 | LPGYKYLGPFNGLDK | | | | X | O56137 |
| 944 | 1326 | LPTYNNHLYKQISSA | | | | X | O56137 |
| 945 | 1327 | LRYNHADAEFQERLQ | | | | X | O56137 |
| 946 | 1328 | LVEEGAKTAPGKKRP | | | | X | O56137 |
| 947 | 1329 | MLRTGNNFTFSYTFE | | | | X | O56137 |
| 948 | 1330 | NFKLFNIQVKEVTTN | | | | X | O56137 |
| 949 | 1331 | NHADAEFQERLQEDT | | | | X | O56137 |
| 950 | 1332 | NLGRAVFQAKKRVLE | | | | X | O56137 |
| 951 | 1333 | PFHSSYAHSQSLDRL | | | | X | O56137 |
| 952 | 1334 | PKRLNFKLFNIQVKE | | | | X | O56137 |
| 953 | 1335 | PPATPAAVGPTTMAS | | | | X | O56137 |
| 954 | 1336 | PPPQILIKNTPVPAN | | | | X | O56137 |
| 955 | 1337 | PQYGYLTLNNGSQAV | | | | X | O56137 |
| 956 | 1338 | PRDWQRLINNNWGFR | | | | X | O56137 |
| 957 | 1339 | PYVLGSAHQGCLPPF | | | | X | O56137 |
| 958 | 1340 | QDDGRGLVLPGYKYL | | | | X | O56137 |
| 959 | 1341 | QDRDVYLQGPIWAKI | | | | X | O56137 |
| 960 | 1342 | QERLQEDTSFGGNLG | | | | X | O56137 |
| 961 | 1343 | QRLINNNWGFRPKRL | | | | X | O56137 |
| 962 | 1344 | QYLYYLNRTQNQSGS | | | | X | O56137 |
| 963 | 1345 | RDVYLQGPIWAKIPH | | | | X | O56137 |
| 964 | 1346 | RDWQRLINNNWGFRP | | | | X | O56137 |
| 965 | 1347 | RGSPAGMSVQPKNWL | | | | X | O56137 |
| 966 | 1348 | RLNFGQTGDSESVPD | | | | X | O56137 |
| 967 | 1349 | RLQEDTSFGGNLGRA | | | | X | O56137 |
| 968 | 1350 | RQQRVSKTKTDNNNS | | | | X | O56137 |
| 969 | 1351 | SEGIREWWDLKPGAP | | | | X | O56137 |
| 970 | 1352 | SKYNLNGRESIINPG | | | | X | O56137 |
| 971 | 1353 | SNFTWTGASKYNLNG | | | | X | O56137 |
| 972 | 1354 | SSFYCLEYFPSQMLR | | | | X | O56137 |
| 973 | 1355 | STRTWALPTYNNHLY | | | | X | O56137 |
| 974 | 1356 | TNPVATERFGTVAVN | | | | X | O56137 |
| 975 | 1357 | TSTRTWALPTYNNHL | | | | X | O56137 |
| 976 | 1358 | TTMASGGGAPMADNN | | | | X | O56137 |
| 977 | 1359 | TWLGDRVITTSTRTW | | | | X | O56137 |
| 978 | 1360 | TYNNHLYKQISSAST | | | | X | O56137 |
| 979 | 1361 | VDNNGLYTEPRPIGT | | | | X | O56137 |
| 980 | 1362 | VFMIPQYGYLTLNNG | | | | X | O56137 |
| 981 | 1363 | VNAADAAALEHDKAY | | | | X | O56137 |
| 982 | 1364 | VPFHSSYAHSQSLDR | | | | X | O56137 |
| 983 | 1365 | VQYTSNYAKSANVDF | | | | X | O56137 |
| 984 | 1366 | WGFRPKRLNFKLFNI | | | | X | O56137 |
| 985 | 1367 | WLGDRVITTSTRTWA | | | | X | O56137 |
| 986 | 1368 | WQDRDVYLQGPIWAK | | | | X | O56137 |
| 987 | 1369 | WQRLINNNWGFRPKR | | | | X | O56137 |
| 988 | 1370 | YAKSANVDFTVDNNG | | | | X | O56137 |
| 989 | 1371 | YGYLTLNNGSQAVGR | | | | X | O56137 |
| 990 | 1372 | YLNRTQNQSGSAQNK | | | | X | O56137 |
| 991 | 1373 | YLRYNHADAEFQERL | | | | X | O56137 |
| 992 | 1374 | YNLNGRESIINPGTA | | | | X | O56137 |
| 993 | 1375 | FQFSYTFEDVPFHSS | | | | X | O56139 |
| 994 | 1376 | QGALPGMVWQDRDVY | | | | X | O56139 |
| 995 | 1377 | NDQGALPGMVWQDRD | | | | X | O56139 |
| 996 | 1378 | EIRTTNPVATEQYGT | | | | X | O56139 |
| 997 | 1379 | EQYGTVANNLQSSNT | | | | X | O56139 |
| 998 | 1380 | PGNGLDKGEPVNEAD | | | | X | O56139 |
| 999 | 1381 | GEPPAAPTSLGSNTM | | | | X | O56139 |
| 1000 | 1382 | GSNTMASGGGAPMAD | | | | X | O56139 |
| 1001 | 1383 | NTMASGGGAPMADNN | | | | X | O56139 |
| 1002 | 1384 | PTTRTVNDQGALPGM | | | | X | O56139 |
| 1003 | 1385 | LGPGNGLDKGEPVNE | | | | X | O56139 |
| 1004 | 1386 | PDPQPLGEPPAAPTS | | | | X | O56139 |
| 1005 | 1387 | PVATEQYGTVANNLQ | | | | X | O56139 |
| 1006 | 1388 | QSMSLQARNWLPGPC | | | | X | O56139 |
| 1007 | 1389 | SGVGKSGKQPARKRL | | | | X | O56139 |
| 1008 | 1390 | TFSPAKFASFITQYS | | | | X | O56139 |
| 1009 | 1391 | TVNDQGALPGMVWQD | | | | X | O56139 |
| 1010 | 1392 | VGNSSGNWHCDSQWL | | | | X | O56139 |
| 1011 | 1393 | EWWALKPGVPQPKAN | | | | X | O56139 |
| 1012 | 1394 | FPWTAASKYHLNGRD | | | | X | O56139 |
| 1013 | 1395 | LINNNWGFRPKKLSF | | | | X | O56139 |
| 1014 | 1396 | MGGFGLKHPPPQIMI | | | | X | O56139 |
| 1015 | 1397 | NPPTTFSPAKFASFI | | | | X | O56139 |
| 1016 | 1398 | NWGFRPKKLSFKLFN | | | | X | O56139 |
| 1017 | 1399 | TNPVATEQYGTVANN | | | | X | O56139 |
| 1018 | 1400 | AAKTAPGKKRPVDQS | | | | X | O56139 |
| 1019 | 1401 | AAPTSLGSNTMASGG | | | | X | O56139 |
| 1020 | 1402 | AASKYHLNGRDSLVN | | | | X | O56139 |
| 1021 | 1403 | ANNLQSSNTAPTTRT | | | | X | O56139 |
| 1022 | 1404 | DQSPQEPDSSSGVGK | | | | X | O56139 |
| 1023 | 1405 | EGIREWWALKPGVPQ | | | | X | O56139 |
| 1024 | 1406 | GKQPARKRLNFGQTG | | | | X | O56139 |
| 1025 | 1407 | GPQSMSLQARNWLPG | | | | X | O56139 |
| 1026 | 1408 | GRAVFQAKKRILEPL | | | | X | O56139 |
| 1027 | 1409 | IKNTPVPANPPTTFS | | | | X | O56139 |
| 1028 | 1410 | IREWWALKPGVPQPK | | | | X | O56139 |
| 1029 | 1411 | KRILEPLGLVEEAAK | | | | X | O56139 |
| 1030 | 1412 | LKPGVPQPKANQQHQ | | | | X | O56139 |
| 1031 | 1413 | NLGRAVFQAKKRILE | | | | X | O56139 |
| 1032 | 1414 | PANPPTTFSPAKFAS | | | | X | O56139 |
| 1033 | 1415 | PQIMIKNTPVPANPP | | | | X | O56139 |
| 1034 | 1416 | QEPDSSSGVGKSGKQ | | | | X | O56139 |
| 1035 | 1417 | SKYHLNGRDSLVNPG | | | | X | O56139 |
| 1036 | 1418 | SLGSNTMASGGGAPM | | | | X | O56139 |
| 1037 | 1419 | SNTAPTTRTVNDQGA | | | | X | O56139 |
| 1038 | 1420 | TAPTTRTVNDQGALP | | | | X | O56139 |
| 1039 | 1421 | HKDDEEKFFPMHGNL | | | | X | O56139 |
| 1040 | 1422 | ASHKDDEEKFFPMHG | | | | X | O56139 |
| 1041 | 1423 | KFFPMHGNLIFGKEG | | | | X | O56139 |
| 1042 | 1424 | NVMITDEEEIRTTNP | | | | X | O56139 |
| 1043 | 1425 | AMASHKDDEEKFFPM | | | | X | O56139 |
| 1044 | 1426 | LDNVMITDEEEIRTT | | | | X | O56139 |
| 1045 | 1427 | FGKEGTTASNAELDN | | | | X | O56139 |
| 1046 | 1428 | KTANDNNNSNFPWTA | | | | X | O56139 |
| 1047 | 1429 | RQQRLSKTANDNNNS | | | | X | O56139 |
| 1048 | 1430 | DNNNSNFPWTAASKY | | | | X | O56139 |
| 1049 | 1431 | FPMHGNLIFGKEGTT | | | | X | O56139 |
| 1050 | 1432 | GNLIFGKEGTTASNA | | | | X | O56139 |
| 1051 | 1433 | KEGTTASNAELDNVM | | | | X | O56139 |
| 1052 | 1434 | LSKTANDNNNSNFPW | | | | X | O56139 |
| 1053 | 1435 | QGTTSGTTNQSRLLF | | | | X | O56139 |
| 1054 | 1436 | TASNAELDNVMITDE | | | | X | O56139 |
| 1055 | 1437 | YLYYLNRTQGTTSGT | | | | X | O56139 |
| 1056 | 1438 | YYLNRTQGTTSGTTN | | | | X | O56139 |
| 1057 | 1439 | QRLINNNWGFRPKKL | | | | X | O56139 |
| 1058 | 1440 | DGNFHPSPLMGGFGM | | | | X | Q6JC40 |
| 1059 | 1441 | GEDRFFPLSGSLIFG | | | | X | Q6JC40 |
| 1060 | 1442 | LEDNLSEGIREWWAL | | | | X | Q6JC40 |
| 1061 | 1443 | NDNAYFGYSTPWGYF | | | | X | Q6JC40 |
| 1062 | 1444 | NFQFSYEFENVPFHS | | | | X | Q6JC40 |
| 1063 | 1445 | NNLTSTVQVFTDSDY | | | | X | Q6JC40 |
| 1064 | 1446 | QGILPGMVWQDRDVY | | | | X | Q6JC40 |
| 1065 | 1447 | EGVYSEPRPIGTRYL | | | | X | Q6JC40 |
| 1066 | 1448 | GILPGMVWQDRDVYL | | | | X | Q6JC40 |
| 1067 | 1449 | NSEFAWPGASSWALN | | | | X | Q6JC40 |
| 1068 | 1450 | PYLKYNHADAEFQER | | | | X | Q6JC40 |
| 1069 | 1451 | KEGEDRFFPLSGSLI | | | | X | Q6JC40 |
| 1070 | 1452 | PGPAMASHKEGEDRF | | | | X | Q6JC40 |
| 1071 | 1453 | QAKKRLLEPLGLVEE | | | | X | Q6JC40 |
| 1072 | 1454 | QNQGILPGMVWQDRD | | | | X | Q6JC40 |
| 1073 | 1455 | EGADGVGSSSGNWHC | | | | X | Q6JC40 |
| 1074 | 1456 | HEGCLPPFPADVFMI | | | | X | Q6JC40 |
| 1075 | 1457 | LVEEAAKTAPGKKRP | | | | X | Q6JC40 |
| 1076 | 1458 | NQGILPGMVWQDRDV | | | | X | Q6JC40 |
| 1077 | 1459 | EVTDNNGVKTIANNL | | | | X | Q6JC40 |
| 1078 | 1460 | GADGVGSSSGNWHCD | | | | X | Q6JC40 |
| 1079 | 1461 | LTSTVQVFTDSDYQL | | | | X | Q6JC40 |
| 1080 | 1462 | NEGADGVGSSSGNWH | | | | X | Q6JC40 |
| 1081 | 1463 | NPVATESYGQVATNH | | | | X | Q6JC40 |
| 1082 | 1464 | NVDADKVMITNEEEI | | | | X | Q6JC40 |
| 1083 | 1465 | PVADNNEGADGVGSS | | | | X | Q6JC40 |
| 1084 | 1466 | SAHEGCLPPFPADVF | | | | X | Q6JC40 |
| 1085 | 1467 | TGDTESVPDPQPIGE | | | | X | Q6JC40 |
| 1086 | 1468 | TMASGGGAPVADNNE | | | | X | Q6JC40 |
| 1087 | 1469 | VEQSPQEPDSSAGIG | | | | X | Q6JC40 |
| 1088 | 1470 | VQVFTDSDYQLPYVL | | | | X | Q6JC40 |
| 1089 | 1471 | EPLGLVEEAAKTAPG | | | | X | Q6JC40 |
| 1090 | 1472 | EPPAAPSGVGSLTMA | | | | X | Q6JC40 |
| 1091 | 1473 | FNKDKLNSFITQYST | | | | X | Q6JC40 |
| 1092 | 1474 | GAPVADNNEGADGVG | | | | X | Q6JC40 |
| 1093 | 1475 | GGGAPVADNNEGADG | | | | X | Q6JC40 |
| 1094 | 1476 | IFGKQGTGRDNVDAD | | | | X | Q6JC40 |
| 1095 | 1477 | ILPGMVWQDRDVYLQ | | | | X | Q6JC40 |
| 1096 | 1478 | MGGFGMKHPPPQILI | | | | X | Q6JC40 |
| 1097 | 1479 | PPQILIKNTPVPADP | | | | X | Q6JC40 |
| 1098 | 1480 | RAVFQAKKRLLEPLG | | | | X | Q6JC40 |
| 1099 | 1481 | RDNVDADKVMITNEE | | | | X | Q6JC40 |
| 1100 | 1482 | SNNVEFAVNTEGVYS | | | | X | Q6JC40 |
| 1101 | 1483 | TEGVYSEPRPIGTRY | | | | X | Q6JC40 |
| 1102 | 1484 | TSGGSSNDNAYFGYS | | | | X | Q6JC40 |
| 1103 | 1485 | TVTQNNNSEFAWPGA | | | | X | Q6JC40 |
| 1104 | 1486 | VLPGYKYLGPGNGLD | | | | X | Q6JC40 |
| 1105 | 1487 | ADPPTAFNKDKLNSF | | | | X | Q6JC40 |
| 1106 | 1488 | ALNGRNSLMNPGPAM | | | | X | Q6JC40 |
| 1107 | 1489 | APSGVGSLTMASGGG | | | | X | Q6JC40 |
| 1108 | 1490 | DNLSEGIREWWALKP | | | | X | Q6JC40 |
| 1109 | 1491 | DPPTAFNKDKLNSFI | | | | X | Q6JC40 |
| 1110 | 1492 | DSQWLGDRVITTSTR | | | | X | Q6JC40 |
| 1111 | 1493 | DSSAGIGKSGAQPAK | | | | X | Q6JC40 |
| 1112 | 1494 | DVFMIPQYGYLTLND | | | | X | Q6JC40 |
| 1113 | 1495 | GIGKSGAQPAKKRLN | | | | X | Q6JC40 |
| 1114 | 1496 | GKQGTGRDNVDADKV | | | | X | Q6JC40 |
| 1115 | 1497 | GNFHPSPLMGGFGMK | | | | X | Q6JC40 |
| 1116 | 1498 | GVGSSSGNWHCDSQW | | | | X | Q6JC40 |
| 1117 | 1499 | ISNSTSGGSSNDNAY | | | | X | Q6JC40 |
| 1118 | 1500 | KLNSFITQYSTGQVS | | | | X | Q6JC40 |
| 1119 | 1501 | KNTPVPADPPTAFNK | | | | X | Q6JC40 |
| 1120 | 1502 | KYLGPGNGLDKGEPV | | | | X | Q6JC40 |
| 1121 | 1503 | LGRAVFQAKKRLLEP | | | | X | Q6JC40 |
| 1122 | 1504 | LGSAHEGCLPPFPAD | | | | X | Q6JC40 |
| 1123 | 1505 | MNPGPAMASHKEGED | | | | X | Q6JC40 |
| 1124 | 1506 | NMAVQGRNYIPGPSY | | | | X | Q6JC40 |
| 1125 | 1507 | NNEGADGVGSSSGNW | | | | X | Q6JC40 |
| 1126 | 1508 | NWHCDSQWLGDRVIT | | | | X | Q6JC40 |
| 1127 | 1509 | PAMASHKEGEDRFFP | | | | X | Q6JC40 |
| 1128 | 1510 | PEIQYTSNYYKSNNV | | | | X | Q6JC40 |
| 1129 | 1511 | QQRVSTTVTQNNNSE | | | | X | Q6JC40 |
| 1130 | 1512 | RLLEPLGLVEEAAKT | | | | X | Q6JC40 |
| 1131 | 1513 | RPVEQSPQEPDSSAG | | | | X | Q6JC40 |
| 1132 | 1514 | TAFNKDKLNSFITQY | | | | X | Q6JC40 |
| 1133 | 1515 | TGWVQNQGILPGMVW | | | | X | Q6JC40 |
| 1134 | 1516 | TQNNNSEFAWPGASS | | | | X | Q6JC40 |
| 1135 | 1517 | VKEVTDNNGVKTIAN | | | | X | Q6JC40 |
| 1136 | 1518 | VPDPQPIGEPPAAPS | | | | X | Q6JC40 |
| 1137 | 1519 | VQNQGILPGMVWQDR | | | | X | Q6JC40 |
| 1138 | 1520 | YFPSQMLRTGNNFQF | | | | X | Q6JC40 |
| 1139 | 1521 | YVLGSAHEGCLPPFP | | | | X | Q6JC40 |
| 1140 | 1522 | ADGVGSSSGNWHCDS | | | | X | Q6JC40 |
| 1141 | 1523 | ANQQHQDNARGLVLP | | | | X | Q6JC40 |
| 1142 | 1524 | AQPAKKRLNFGQTGD | | | | X | Q6JC40 |
| 1143 | 1525 | ARGLVLPGYKYLGPG | | | | X | Q6JC40 |
| 1144 | 1526 | ASSWALNGRNSLMNP | | | | X | Q6JC40 |
| 1145 | 1527 | AVNTEGVYSEPRPIG | | | | X | Q6JC40 |
| 1146 | 1528 | DNNEGADGVGSSSGN | | | | X | Q6JC40 |
| 1147 | 1529 | DPQPIGEPPAAPSGV | | | | X | Q6JC40 |
| 1148 | 1530 | DRFFPLSGSLIFGKQ | | | | X | Q6JC40 |
| 1149 | 1531 | FGMKHPPPQILIKNT | | | | X | Q6JC40 |
| 1150 | 1532 | GLVLPGYKYLGPGNG | | | | X | Q6JC40 |
| 1151 | 1533 | GNLGRAVFQAKKRLL | | | | X | Q6JC40 |
| 1152 | 1534 | GPGNGLDKGEPVNAA | | | | X | Q6JC40 |
| 1153 | 1535 | GQTGDTESVPDPQPI | | | | X | Q6JC40 |
| 1154 | 1536 | GSSSGNWHCDSQWLG | | | | X | Q6JC40 |
| 1155 | 1537 | GWVQNQGILPGMVWQ | | | | X | Q6JC40 |
| 1156 | 1538 | IANNLTSTVQVFTDS | | | | X | Q6JC40 |
| 1157 | 1539 | KKRLLEPLGLVEEAA | | | | X | Q6JC40 |
| 1158 | 1540 | KKRLNFGQTGDTESV | | | | X | Q6JC40 |
| 1159 | 1541 | LEPLGLVEEAAKTAP | | | | X | Q6JC40 |
| 1160 | 1542 | LGLVEEAAKTAPGKK | | | | X | Q6JC40 |
| 1161 | 1543 | LKAGDNPYLKYNHAD | | | | X | Q6JC40 |
| 1162 | 1544 | LMGGFGMKHPPPQIL | | | | X | Q6JC40 |
| 1163 | 1545 | LNDGSQAVGRSSFYC | | | | X | Q6JC40 |
| 1164 | 1546 | LPYVLGSAHEGCLPP | | | | X | Q6JC40 |
| 1165 | 1547 | LSEGIREWWALKPGA | | | | X | Q6JC40 |
| 1166 | 1548 | MKHPPPQILIKNTPV | | | | X | Q6JC40 |
| 1167 | 1549 | NLSEGIREWWALKPG | | | | X | Q6JC40 |
| 1168 | 1550 | NSTSGGSSNDNAYFG | | | | X | Q6JC40 |
| 1169 | 1551 | NTEGVYSEPRPIGTR | | | | X | Q6JC40 |
| 1170 | 1552 | NYYKSNNVEFAVNTE | | | | X | Q6JC40 |
| 1171 | 1553 | PADPPTAFNKDKLNS | | | | X | Q6JC40 |
| 1172 | 1554 | PAKKRLNFGQTGDTE | | | | X | Q6JC40 |
| 1173 | 1555 | PLIDQYLYYLSKTIN | | | | X | Q6JC40 |
| 1174 | 1556 | PLMGGFGMKHPPPQI | | | | X | Q6JC40 |
| 1175 | 1557 | PQEPDSSAGIGKSGA | | | | X | Q6JC40 |
| 1176 | 1558 | PQPKANQQHQDNARG | | | | X | Q6JC40 |
| 1177 | 1559 | PSPLMGGFGMKHPPP | | | | X | Q6JC40 |
| 1178 | 1560 | PSQMLRTGNNFQFSY | | | | X | Q6JC40 |
| 1179 | 1561 | PSYRQQRVSTTVTQN | | | | X | Q6JC40 |
| 1180 | 1562 | QNQQTLKFSVAGPSN | | | | X | Q6JC40 |
| 1181 | 1563 | QTGWVQNQGILPGMV | | | | X | Q6JC40 |
| 1182 | 1564 | QYTSNYYKSNNVEFA | | | | X | Q6JC40 |
| 1183 | 1565 | RLMNPLIDQYLYYLS | | | | X | Q6JC40 |
| 1184 | 1566 | RLNFGQTGDTESVPD | | | | X | Q6JC40 |
| 1185 | 1567 | RNSLMNPGPAMASHK | | | | X | Q6JC40 |
| 1186 | 1568 | SAQAQAQTGWVQNQG | | | | X | Q6JC40 |
| 1187 | 1569 | SGNWHCDSQWLGDRV | | | | X | Q6JC40 |
| 1188 | 1570 | SHKEGEDRFFPLSGS | | | | X | Q6JC40 |
| 1189 | 1571 | SLMNPGPAMASHKEG | | | | X | Q6JC40 |
| 1190 | 1572 | SQMLRTGNNFQFSYE | | | | X | Q6JC40 |
| 1191 | 1573 | TDSDYQLPYVLGSAH | | | | X | Q6JC40 |
| 1192 | 1574 | TESYGQVATNHQSAQ | | | | X | Q6JC40 |
| 1193 | 1575 | TLKFSVAGPSNMAVQ | | | | X | Q6JC40 |
| 1194 | 1576 | TSNYYKSNNVEFAVN | | | | X | Q6JC40 |
| 1195 | 1577 | VFTDSDYQLPYVLGS | | | | X | Q6JC40 |
| 1196 | 1578 | VGSLTMASGGGAPVA | | | | X | Q6JC40 |
| 1197 | 1579 | VPADPPTAFNKDKLN | | | | X | Q6JC40 |
| 1198 | 1580 | WVQNQGILPGMVWQD | | | | X | Q6JC40 |
| 1199 | 1581 | WWALKPGAPQPKANQ | | | | X | Q6JC40 |
| 1200 | 1582 | YDQQLKAGDNPYLKY | | | | X | Q6JC40 |
| 1201 | 1583 | YKYLGPGNGLDKGEP | | | | X | Q6JC40 |
| 1202 | 1584 | YLGPGNGLDKGEPVN | | | | X | Q6JC40 |
| 1203 | 1585 | YRQQRVSTTVTQNNN | | | | X | Q6JC40 |
| 1204 | 1586 | YYKSNNVEFAVNTEG | | | | X | Q6JC40 |
| 1205 | 1587 | TDGNFHPSPLMGGFG | | | | X | Q6JC40 |
| 1206 | 1588 | WELQKENSKRWNPEI | | | | X | Q6JC40 |
| 1207 | 1589 | HTDGNFHPSPLMGGF | | | | X | Q6JC40 |
| 1208 | 1590 | PHTDGNFHPSPLMGG | | | | X | Q6JC40 |
| 1209 | 1591 | AKIPHTDGNFHPSPL | | | | X | Q6JC40 |
| 1210 | 1592 | QKENSKRWNPEIQYT | | | | X | Q6JC40 |
| 1211 | 1593 | GPIWAKIPHTDGNFH | | | | X | Q6JC40 |
| 1212 | 1594 | GVYSEPRPIGTRYLT | | | | X | Q6JC40 |
| 1213 | 1595 | KENSKRWNPEIQYTS | | | | X | Q6JC40 |
| 1214 | 1596 | KIPHTDGNFHPSPLM | | | | X | Q6JC40 |
| 1215 | 1597 | LQKENSKRWNPEIQY | | | | X | Q6JC40 |
| 1216 | 1598 | PIWAKIPHTDGNFHP | | | | X | Q6JC40 |
| 1217 | 1599 | TIQVFTDSEYQLPYV | | | | X | Q8JQF8 |
| 1218 | 1600 | NNLTSTIQVFTDSEY | | | | X | Q8JQF8 |
| 1219 | 1601 | HKDDEERFFPSNGIL | | | | X | Q8JQF8 |
| 1220 | 1602 | SSGNWHCDSTWLGDR | | | | X | Q8JQF8 |
| 1221 | 1603 | ATNDNTYFGYSTPWG | | | | X | Q8JQF8 |
| 1222 | 1604 | NFQFTYTFEDVPFHS | | | | X | Q8JQF8 |
| 1223 | 1605 | TAPGKKRPVEPSPQR | | | | X | Q8JQF8 |
| 1224 | 1606 | AALEHDKAYDQQLQA | | | | X | Q8JQF8 |
| 1225 | 1607 | ADYSDVMLTSEEEIK | | | | X | Q8JQF8 |
| 1226 | 1608 | ATHKDDEERFFPSNG | | | | X | Q8JQF8 |
| 1227 | 1609 | EPPAAPSGVGPNTMA | | | | X | Q8JQF8 |
| 1228 | 1610 | EWWALKPGAPKPKAN | | | | X | Q8JQF8 |
| 1229 | 1611 | FGKQNAARDNADYSD | | | | X | Q8JQF8 |
| 1230 | 1612 | MAAGGGAPMADNNEG | | | | X | Q8JQF8 |
| 1231 | 1613 | PQIGTVNSQGALPGM | | | | X | Q8JQF8 |
| 1232 | 1614 | QVFTDSEYQLPYVLG | | | | X | Q8JQF8 |
| 1233 | 1615 | VGSSSGNWHCDSTWL | | | | X | Q8JQF8 |
| 1234 | 1616 | ANNLTSTIQVFTDSE | | | | X | Q8JQF8 |
| 1235 | 1617 | GIAMATHKDDEERFF | | | | X | Q8JQF8 |
| 1236 | 1618 | GVGSSSGNWHCDSTW | | | | X | Q8JQF8 |
| 1237 | 1619 | IDQYLYYLSRTQTTG | | | | X | Q8JQF8 |
| 1238 | 1620 | IQVFTDSEYQLPYVL | | | | X | Q8JQF8 |
| 1239 | 1621 | RQQRVSTTTGQNNNS | | | | X | Q8JQF8 |
| 1240 | 1622 | TAPQIGTVNSQGALP | | | | X | Q8JQF8 |
| 1241 | 1623 | YDQQLQAGDNPYLRY | | | | X | Q8JQF8 |
| 1242 | 1624 | ATEEYGIVADNLQQQ | | | | X | Q8JQF8 |
| 1243 | 1625 | EGAKTAPGKKRPVEP | | | | X | Q8JQF8 |
| 1244 | 1626 | EVTQNEGTKTIANNL | | | | X | Q8JQF8 |
| 1245 | 1627 | FKLFNIQVKEVTQNE | | | | X | Q8JQF8 |
| 1246 | 1628 | FPSQMLRTGNNFQFT | | | | X | Q8JQF8 |
| 1247 | 1629 | GPNTMANQAKNWLPG | | | | X | Q8JQF8 |
| 1248 | 1630 | LEHDKAYDQQLQAGD | | | | X | Q8JQF8 |
| 1249 | 1631 | LIFGKQNAARDNADY | | | | X | Q8JQF8 |
| 1250 | 1632 | LTSTIQVFTDSEYQL | | | | X | Q8JQF8 |
| 1251 | 1633 | LYKQISNGTSGGATN | | | | X | Q8JQF8 |
| 1252 | 1634 | MANQAKNWLPGPCYR | | | | X | Q8JQF8 |
| 1253 | 1635 | NLTSTIQVFTDSEYQ | | | | X | Q8JQF8 |
| 1254 | 1636 | NPGIAMATHKDDEER | | | | X | Q8JQF8 |
| 1255 | 1637 | NQSKLNSFITQYSTG | | | | X | Q8JQF8 |
| 1256 | 1638 | PNTMAAGGGAPMADN | | | | X | Q8JQF8 |
| 1257 | 1639 | SFKLFNIQVKEVTQN | | | | X | Q8JQF8 |
| 1258 | 1640 | TDSEYQLPYVLGSAH | | | | X | Q8JQF8 |
| 1259 | 1641 | TMAAGGGAPMADNNE | | | | X | Q8JQF8 |
| 1260 | 1642 | AMATHKDDEERFFPS | | | | X | Q8JQF8 |
| 1261 | 1643 | APSGVGPNTMAAGGG | | | | X | Q8JQF8 |
| 1262 | 1644 | DPPTTFNQSKLNSFI | | | | X | Q8JQF8 |
| 1263 | 1645 | DPQPLGEPPAAPSGV | | | | X | Q8JQF8 |
| 1264 | 1646 | EGIREWWALKPGAPK | | | | X | Q8JQF8 |
| 1265 | 1647 | FPSNGILIFGKQNAA | | | | X | Q8JQF8 |
| 1266 | 1648 | FTDSEYQLPYVLGSA | | | | X | Q8JQF8 |
| 1267 | 1649 | GAKTAPGKKRPVEPS | | | | X | Q8JQF8 |
| 1268 | 1650 | GGTANTQTLGFSQGG | | | | X | Q8JQF8 |
| 1269 | 1651 | GILIFGKQNAARDNA | | | | X | Q8JQF8 |
| 1270 | 1652 | GTKTIANNLTSTIQV | | | | X | Q8JQF8 |
| 1271 | 1653 | INNNWGFRPKRLSFK | | | | X | Q8JQF8 |
| 1272 | 1654 | IQYTSNYYKSTSVDF | | | | X | Q8JQF8 |
| 1273 | 1655 | ISNGTSGGATNDNTY | | | | X | Q8JQF8 |
| 1274 | 1656 | KAYDQQLQAGDNPYL | | | | X | Q8JQF8 |
| 1275 | 1657 | KEVTQNEGTKTIANN | | | | X | Q8JQF8 |
| 1276 | 1658 | KLFNIQVKEVTQNEG | | | | X | Q8JQF8 |
| 1277 | 1659 | KSTSVDFAVNTEGVY | | | | X | Q8JQF8 |
| 1278 | 1660 | KTIANNLTSTIQVFT | | | | X | Q8JQF8 |
| 1279 | 1661 | KTTNPVATEEYGIVA | | | | X | Q8JQF8 |
| 1280 | 1662 | LMNPLIDQYLYYLSR | | | | X | Q8JQF8 |
| 1281 | 1663 | LPTYNNHLYKQISNG | | | | X | Q8JQF8 |
| 1282 | 1664 | LTSEEEIKTTNPVAT | | | | X | Q8JQF8 |
| 1283 | 1665 | MADNNEGADGVGSSS | | | | X | Q8JQF8 |
| 1284 | 1666 | NGTSGGATNDNTYFG | | | | X | Q8JQF8 |
| 1285 | 1667 | NHLYKQISNGTSGGA | | | | X | Q8JQF8 |
| 1286 | 1668 | NIQVKEVTQNEGTKT | | | | X | Q8JQF8 |
| 1287 | 1669 | NLQQQNTAPQIGTVN | | | | X | Q8JQF8 |
| 1288 | 1670 | NNHLYKQISNGTSGG | | | | X | Q8JQF8 |
| 1289 | 1671 | NTMANQAKNWLPGPC | | | | X | Q8JQF8 |
| 1290 | 1672 | PEIQYTSNYYKSTSV | | | | X | Q8JQF8 |
| 1291 | 1673 | PGKKRPVEPSPQRSP | | | | X | Q8JQF8 |
| 1292 | 1674 | PTYNNHLYKQISNGT | | | | X | Q8JQF8 |
| 1293 | 1675 | QGGPNTMANQAKNWL | | | | X | Q8JQF8 |
| 1294 | 1676 | QNEGTKTIANNLTST | | | | X | Q8JQF8 |
| 1295 | 1677 | QNNNSNFAWTAGTKY | | | | X | Q8JQF8 |
| 1296 | 1678 | QNTAPQIGTVNSQGA | | | | X | Q8JQF8 |
| 1297 | 1679 | QPLGEPPAAPSGVGP | | | | X | Q8JQF8 |
| 1298 | 1680 | QTLGFSQGGPNTMAN | | | | X | Q8JQF8 |
| 1299 | 1681 | QVKEVTQNEGTKTIA | | | | X | Q8JQF8 |
| 1300 | 1682 | SGVGPNTMAAGGGAP | | | | X | Q8JQF8 |
| 1301 | 1683 | SNFAWTAGTKYHLNG | | | | X | Q8JQF8 |
| 1302 | 1684 | SQGALPGMVWQNRDV | | | | X | Q8JQF8 |
| 1303 | 1685 | TQNEGTKTIANNLTS | | | | X | Q8JQF8 |
| 1304 | 1686 | TSGGATNDNTYFGYS | | | | X | Q8JQF8 |
| 1305 | 1687 | TSTIQVFTDSEYQLP | | | | X | Q8JQF8 |
| 1306 | 1688 | TYNNHLYKQISNGTS | | | | X | Q8JQF8 |
| 1307 | 1689 | VGPNTMAAGGGAPMA | | | | X | Q8JQF8 |
| 1308 | 1690 | VMLTSEEEIKTTNPV | | | | X | Q8JQF8 |
| 1309 | 1691 | WLPGPCYRQQRVSTT | | | | X | Q8JQF8 |
| 1310 | 1692 | YLSRTQTTGGTANTQ | | | | X | Q8JQF8 |
| 1311 | 1693 | YYKSTSVDFAVNTEG | | | | X | Q8JQF8 |
| 1312 | 1694 | DGNFHPSPLMGGFGL | | | | X | Q8JQF8 |
| 1313 | 1695 | NDNTYFGYSTPWGYF | | | | X | Q8JQF8 |
| 1314 | 1696 | GALPGMVWQNRDVYL | | | | X | Q8JQF8 |
| 1315 | 1697 | AGGGAPMADNNEGAD | | | | X | Q8JQF8 |
| 1316 | 1698 | RPVEPSPQRSPDSST | | | | X | Q8JQF8 |
| 1317 | 1699 | MVWQNRDVYLQGPIW | | | | X | Q8JQF8 |
| 1318 | 1700 | TNDNTYFGYSTPWGY | | | | X | Q8JQF8 |
| 1319 | 1701 | KRPVEPSPQRSPDSS | | | | X | Q8JQF8 |
| 1320 | 1702 | LPGMVWQNRDVYLQG | | | | X | Q8JQF8 |
| 1321 | 1703 | VPDPQPLGEPPAAPS | | | | X | Q8JQF8 |
| 1322 | 1704 | VWQNRDVYLQGPIWA | | | | X | Q8JQF8 |
| 1323 | 1705 | AAGGGAPMADNNEGA | | | | X | Q8JQF8 |
| 1324 | 1706 | DSSTGIGKKGQQPAR | | | | X | Q8JQF8 |
| 1325 | 1707 | GKKGQQPARKRLNFG | | | | X | Q8JQF8 |
| 1326 | 1708 | NFHPSPLMGGFGLKH | | | | X | Q8JQF8 |
| 1327 | 1709 | QGALPGMVWQNRDVY | | | | X | Q8JQF8 |
| 1328 | 1710 | QQPARKRLNFGQTGD | | | | X | Q8JQF8 |
| 1329 | 1711 | ALPGMVWQNRDVYLQ | | | | X | Q8JQF8 |
| 1330 | 1712 | GIGKKGQQPARKRLN | | | | X | Q8JQF8 |
| 1331 | 1713 | GMVWQNRDVYLQGPI | | | | X | Q8JQF8 |
| 1332 | 1714 | GNFHPSPLMGGFGLK | | | | X | Q8JQF8 |
| 1333 | 1715 | KKRPVEPSPQRSPDS | | | | X | Q8JQF8 |
| 1334 | 1716 | PDSSTGIGKKGQQPA | | | | X | Q8JQF8 |
| 1335 | 1717 | PGMVWQNRDVYLQGP | | | | X | Q8JQF8 |
| 1336 | 1718 | QRSPDSSTGIGKKGQ | | | | X | Q8JQF8 |
| 1337 | 1719 | VEPSPQRSPDSSTGI | | | | X | Q8JQF8 |
| 1338 | 1720 | QAKKRVLEPLGLVEE | | | | X | Q8JQF8 |
| 1339 | 1721 | EPLGLVEEGAKTAPG | | | | X | Q8JQF8 |
| 1340 | 1722 | RAVFQAKKRVLEPLG | | | | X | Q8JQF8 |
| 1341 | 1723 | AKKRVLEPLGLVEEG | | | | X | Q8JQF8 |
| 1342 | 1724 | FQAKKRVLEPLGLVE | | | | X | Q8JQF8 |
| 1343 | 1725 | PLGLVEEGAKTAPGK | | | | X | Q8JQF8 |
| 1344 | 1726 | RVLEPLGLVEEGAKT | | | | X | Q8JQF8 |
| 1345 | 1727 | GYSTPWGYFDFNRFH | | | | X | Q9YIJ1 |
| 1346 | 1728 | FEFTYNFEEVPFHSS | | | | X | Q9YIJ1 |
| 1347 | 1729 | NPTERSSFFCLEYFP | | | | X | Q9YIJ1 |
| 1348 | 1730 | GDWHCDSTWMGDRVV | | | | X | Q9YIJ1 |
| 1349 | 1731 | TVQVFTDDDYQLPYV | | | | X | Q9YIJ1 |
| 1350 | 1732 | FTYNFEEVPFHSSFA | | | | X | Q9YIJ1 |
| 1351 | 1733 | VDHPPDWLEEVGEGL | | | | X | Q9YIJ1 |
| 1352 | 1734 | RSSFFCLEYFPSKML | | | | X | Q9YIJ1 |
| 1353 | 1735 | TGAHFHPSPAMGGFG | | | | X | Q9YIJ1 |
| 1354 | 1736 | ASGDWHCDSTWMGDR | | | | X | Q9YIJ1 |
| 1355 | 1737 | GVGNASGDWHCDSTW | | | | X | Q9YIJ1 |
| 1356 | 1738 | PQFVDFAPDSTGEYR | | | | X | Q9YIJ1 |
| 1357 | 1739 | RGEPVNRADEVAREH | | | | X | Q9YIJ1 |
| 1358 | 1740 | AYFGYSTPWGYFDFN | | | | X | Q9YIJ1 |
| 1359 | 1741 | DNTENPTERSSFFCL | | | | X | Q9YIJ1 |
| 1360 | 1742 | DYQLPYVVGNGTEGC | | | | X | Q9YIJ1 |
| 1361 | 1743 | PETGAHFHPSPAMGG | | | | X | Q9YIJ1 |
| 1362 | 1744 | RADEVAREHDISYNE | | | | X | Q9YIJ1 |
| 1363 | 1745 | TERSSFFCLEYFPSK | | | | X | Q9YIJ1 |
| 1364 | 1746 | EGLREFLGLEAGPPK | | | | X | Q9YIJ1 |
| 1365 | 1747 | NDPQFVDFAPDSTGE | | | | X | Q9YIJ1 |
| 1366 | 1748 | PAMGGFGLKHPPPMM | | | | X | Q9YIJ1 |
| 1367 | 1749 | VAREHDISYNEQLEA | | | | X | Q9YIJ1 |
| 1368 | 1750 | VNRADEVAREHDISY | | | | X | Q9YIJ1 |
| 1369 | 1751 | YNHADAEFQEKLADD | | | | X | Q9YIJ1 |
| 1370 | 1752 | EPFGLVEEGAKTAPT | | | | X | Q9YIJ1 |
| 1371 | 1753 | FSDVPVSSFITQYST | | | | X | Q9YIJ1 |
| 1372 | 1754 | FTDDDYQLPYVVGNG | | | | X | Q9YIJ1 |
| 1373 | 1755 | HADAEFQEKLADDTS | | | | X | Q9YIJ1 |
| 1374 | 1756 | MGGFGLKHPPPMMLI | | | | X | Q9YIJ1 |
| 1375 | 1757 | NGLDRGEPVNRADEV | | | | X | Q9YIJ1 |
| 1376 | 1758 | NPEIQYTNNYNDPQF | | | | X | Q9YIJ1 |
| 1377 | 1759 | QVFTDDDYQLPYVVG | | | | X | Q9YIJ1 |
| 1378 | 1760 | REHDISYNEQLEAGD | | | | X | Q9YIJ1 |
| 1379 | 1761 | VGEGLREFLGLEAGP | | | | X | Q9YIJ1 |
| 1380 | 1762 | WGYFDFNRFHSHWSP | | | | X | Q9YIJ1 |
| 1381 | 1763 | WSPRDWQRLINNYWG | | | | X | Q9YIJ1 |
| 1382 | 1764 | YFDFNRFHSHWSPRD | | | | X | Q9YIJ1 |
| 1383 | 1765 | ADGVGNASGDWHCDS | | | | X | Q9YIJ1 |
| 1384 | 1766 | ARTEEDSKPSTSSDA | | | | X | Q9YIJ1 |
| 1385 | 1767 | ASVSAFATTNRMELE | | | | X | Q9YIJ1 |
| 1386 | 1768 | DFNRFHSHWSPRDWQ | | | | X | Q9YIJ1 |
| 1387 | 1769 | EGCLPAFPPQVFTLP | | | | X | Q9YIJ1 |
| 1388 | 1770 | ETQPVNRVAYNVGGQ | | | | X | Q9YIJ1 |
| 1389 | 1771 | FHPSPAMGGFGLKHP | | | | X | Q9YIJ1 |
| 1390 | 1772 | GGGGPLGDNNQGADG | | | | X | Q9YIJ1 |
| 1391 | 1773 | GGPLGDNNQGADGVG | | | | X | Q9YIJ1 |
| 1392 | 1774 | IDDHFPKRKKARTEE | | | | X | Q9YIJ1 |
| 1393 | 1775 | LVEEGAKTAPTGKRI | | | | X | Q9YIJ1 |
| 1394 | 1776 | NLQEIVPGSVWMERD | | | | X | Q9YIJ1 |
| 1395 | 1777 | NPYLKYNHADAEFQE | | | | X | Q9YIJ1 |
| 1396 | 1778 | PAFPPQVFTLPQYGY | | | | X | Q9YIJ1 |
| 1397 | 1779 | PASSLGADTMSAGGG | | | | X | Q9YIJ1 |
| 1398 | 1780 | PVSSFITQYSTGQVT | | | | X | Q9YIJ1 |
| 1399 | 1781 | QGADGVGNASGDWHC | | | | X | Q9YIJ1 |
| 1400 | 1782 | TGGVQFNKNLAGRYA | | | | X | Q9YIJ1 |
| 1401 | 1783 | VSAFATTNRMELEGA | | | | X | Q9YIJ1 |
| 1402 | 1784 | YFPSKMLRTGNNFEF | | | | X | Q9YIJ1 |
| 1403 | 1785 | YNFEEVPFHSSFAPS | | | | X | Q9YIJ1 |
| 1404 | 1786 | AFATTNRMELEGASY | | | | X | Q9YIJ1 |
| 1405 | 1787 | AHFHPSPAMGGFGLK | | | | X | Q9YIJ1 |
| 1406 | 1788 | DFAPDSTGEYRTTRP | | | | X | Q9YIJ1 |
| 1407 | 1789 | DGSNANAYFGYSTPW | | | | X | Q9YIJ1 |
| 1408 | 1790 | DNPYLKYNHADAEFQ | | | | X | Q9YIJ1 |
| 1409 | 1791 | DSTGEYRTTRPIGTR | | | | X | Q9YIJ1 |
| 1410 | 1792 | EGNMLITSESETQPV | | | | X | Q9YIJ1 |
| 1411 | 1793 | FVSTNNTGGVQFNKN | | | | X | Q9YIJ1 |
| 1412 | 1794 | GDNPYLKYNHADAEF | | | | X | Q9YIJ1 |
| 1413 | 1795 | GGNLGKAVFQAKKRV | | | | X | Q9YIJ1 |
| 1414 | 1796 | GTEGCLPAFPPQVFT | | | | X | Q9YIJ1 |
| 1415 | 1797 | HDISYNEQLEAGDNP | | | | X | Q9YIJ1 |
| 1416 | 1798 | IVPGSVWMERDVYLQ | | | | X | Q9YIJ1 |
| 1417 | 1799 | KIPETGAHFHPSPAM | | | | X | Q9YIJ1 |
| 1418 | 1800 | KMLRTGNNFEFTYNF | | | | X | Q9YIJ1 |
| 1419 | 1801 | LEAGPPKPKPNQQHQ | | | | X | Q9YIJ1 |
| 1420 | 1802 | LEYFPSKMLRTGNNF | | | | X | Q9YIJ1 |
| 1421 | 1803 | LGPGNGLDRGEPVNR | | | | X | Q9YIJ1 |
| 1422 | 1804 | LPGYNYLGPGNGLDR | | | | X | Q9YIJ1 |
| 1423 | 1805 | LVDQYLYRFVSTNNT | | | | X | Q9YIJ1 |
| 1424 | 1806 | NIQVKEVTVQDSTTT | | | | X | Q9YIJ1 |
| 1425 | 1807 | NITSFSDVPVSSFIT | | | | X | Q9YIJ1 |
| 1426 | 1808 | NNQGADGVGNASGDW | | | | X | Q9YIJ1 |
| 1427 | 1809 | NRASVSAFATTNRME | | | | X | Q9YIJ1 |
| 1428 | 1810 | NTPVPGNITSFSDVP | | | | X | Q9YIJ1 |
| 1429 | 1811 | NYLGPGNGLDRGEPV | | | | X | Q9YIJ1 |
| 1430 | 1812 | PATGTYNLQEIVPGS | | | | X | Q9YIJ1 |
| 1431 | 1813 | PGNGLDRGEPVNRAD | | | | X | Q9YIJ1 |
| 1432 | 1814 | PGNITSFSDVPVSSF | | | | X | Q9YIJ1 |
| 1433 | 1815 | PRDWQRLINNYWGFR | | | | X | Q9YIJ1 |
| 1434 | 1816 | PSPAMGGFGLKHPPP | | | | X | Q9YIJ1 |
| 1435 | 1817 | PYVVGNGTEGCLPAF | | | | X | Q9YIJ1 |
| 1436 | 1818 | QARGLVLPGYNYLGP | | | | X | Q9YIJ1 |
| 1437 | 1819 | QEKLADDTSFGGNLG | | | | X | Q9YIJ1 |
| 1438 | 1820 | QLPYVVGNGTEGCLP | | | | X | Q9YIJ1 |
| 1439 | 1821 | RMELEGASYQVPPQP | | | | X | Q9YIJ1 |
| 1440 | 1822 | SVWMERDVYLQGPIW | | | | X | Q9YIJ1 |
| 1441 | 1823 | TGEYRTTRPIGTRYL | | | | X | Q9YIJ1 |
| 1442 | 1824 | TTTIANNLTSTVQVF | | | | X | Q9YIJ1 |
| 1443 | 1825 | VVGNGTEGCLPAFPP | | | | X | Q9YIJ1 |
| 1444 | 1826 | WMERDVYLQGPIWAK | | | | X | Q9YIJ1 |
| 1445 | 1827 | WMGDRVVTKSTRTWV | | | | X | Q9YIJ1 |
| 1446 | 1828 | YLYRFVSTNNTGGVQ | | | | X | Q9YIJ1 |
| 1447 | 1829 | ADDTSFGGNLGKAVF | | | | X | Q9YIJ1 |
| 1448 | 1830 | AKKRVLEPFGLVEEG | | | | X | Q9YIJ1 |
| 1449 | 1831 | ALENTMIFNSQPANP | | | | X | Q9YIJ1 |
| 1450 | 1832 | APDSTGEYRTTRPIG | | | | X | Q9YIJ1 |
| 1451 | 1833 | APSQNLFKLANPLVD | | | | X | Q9YIJ1 |
| 1452 | 1834 | APTGKRIDDHFPKRK | | | | X | Q9YIJ1 |
| 1453 | 1835 | ASYQVPPQPNGMTNN | | | | X | Q9YIJ1 |
| 1454 | 1836 | ATNNQSSTTAPATGT | | | | X | Q9YIJ1 |
| 1455 | 1837 | DHFPKRKKARTEEDS | | | | X | Q9YIJ1 |
| 1456 | 1838 | DTSFGGNLGKAVFQA | | | | X | Q9YIJ1 |
| 1457 | 1839 | DVPVSSFITQYSTGQ | | | | X | Q9YIJ1 |
| 1458 | 1840 | DWQRLINNYWGFRPR | | | | X | Q9YIJ1 |
| 1459 | 1841 | FPPQVFTLPQYGYAT | | | | X | Q9YIJ1 |
| 1460 | 1842 | FQAKKRVLEPFGLVE | | | | X | Q9YIJ1 |
| 1461 | 1843 | GDNNQGADGVGNASG | | | | X | Q9YIJ1 |
| 1462 | 1844 | GDRVVTKSTRTWVLP | | | | X | Q9YIJ1 |
| 1463 | 1845 | GFRPRSLRVKIFNIQ | | | | X | Q9YIJ1 |
| 1464 | 1846 | GGQMATNNQSSTTAP | | | | X | Q9YIJ1 |
| 1465 | 1847 | GSGVNRASVSAFATT | | | | X | Q9YIJ1 |
| 1466 | 1848 | GSQQLQIPAQPASSL | | | | X | Q9YIJ1 |
| 1467 | 1849 | GVNRASVSAFATTNR | | | | X | Q9YIJ1 |
| 1468 | 1850 | IKSGSVDGSNANAYF | | | | X | Q9YIJ1 |
| 1469 | 1851 | KEVTVQDSTTTIANN | | | | X | Q9YIJ1 |
| 1470 | 1852 | KKENSKRWNPEIQYT | | | | X | Q9YIJ1 |
| 1471 | 1853 | LDRGEPVNRADEVAR | | | | X | Q9YIJ1 |
| 1472 | 1854 | LGADTMSAGGGGPLG | | | | X | Q9YIJ1 |
| 1473 | 1855 | LINNYWGFRPRSLRV | | | | X | Q9YIJ1 |
| 1474 | 1856 | LREFLGLEAGPPKPK | | | | X | Q9YIJ1 |
| 1475 | 1857 | LVLPGYNYLGPGNGL | | | | X | Q9YIJ1 |
| 1476 | 1858 | NLAGRYANTYKNWFP | | | | X | Q9YIJ1 |
| 1477 | 1859 | NLFKLANPLVDQYLY | | | | X | Q9YIJ1 |
| 1478 | 1860 | NNQSSTTAPATGTYN | | | | X | Q9YIJ1 |
| 1479 | 1861 | NNTGGVQFNKNLAGR | | | | X | Q9YIJ1 |
| 1480 | 1862 | NPLVDQYLYRFVSTN | | | | X | Q9YIJ1 |
| 1481 | 1863 | NRDNTENPTERSSFF | | | | X | Q9YIJ1 |
| 1482 | 1864 | PFHSSFAPSQNLFKL | | | | X | Q9YIJ1 |
| 1483 | 1865 | PIWAKIPETGAHFHP | | | | X | Q9YIJ1 |
| 1484 | 1866 | PLGDNNQGADGVGNA | | | | X | Q9YIJ1 |
| 1485 | 1867 | PMGRTQGWNLGSGVN | | | | X | Q9YIJ1 |
| 1486 | 1868 | PMMLIKNTPVPGNIT | | | | X | Q9YIJ1 |
| 1487 | 1869 | PQPNGMTNNLQGSNT | | | | X | Q9YIJ1 |
| 1488 | 1870 | QGPIWAKIPETGAHF | | | | X | Q9YIJ1 |
| 1489 | 1871 | QGSNTYALENTMIFN | | | | X | Q9YIJ1 |
| 1490 | 1872 | QPVNRVAYNVGGQMA | | | | X | Q9YIJ1 |
| 1491 | 1873 | QVKEVTVQDSTTTIA | | | | X | Q9YIJ1 |
| 1492 | 1874 | REIKSGSVDGSNANA | | | | X | Q9YIJ1 |
| 1493 | 1875 | RTTRPIGTRYLTRPL | | | | X | Q9YIJ1 |
| 1494 | 1876 | RWNPEIQYTNNYNDP | | | | X | Q9YIJ1 |
| 1495 | 1877 | RYANTYKNWFPGPMG | | | | X | Q9YIJ1 |
| 1496 | 1878 | SFFCLEYFPSKMLRT | | | | X | Q9YIJ1 |
| 1497 | 1879 | SFGGNLGKAVFQAKK | | | | X | Q9YIJ1 |
| 1498 | 1880 | SNANAYFGYSTPWGY | | | | X | Q9YIJ1 |
| 1499 | 1881 | SNTYALENTMIFNSQ | | | | X | Q9YIJ1 |
| 1500 | 1882 | SQNLFKLANPLVDQY | | | | X | Q9YIJ1 |
| 1501 | 1883 | SVDGSNANAYFGYST | | | | X | Q9YIJ1 |
| 1502 | 1884 | TGTYNLQEIVPGSVW | | | | X | Q9YIJ1 |
| 1503 | 1885 | TLNRDNTENPTERSS | | | | X | Q9YIJ1 |
| 1504 | 1886 | TSESETQPVNRVAYN | | | | X | Q9YIJ1 |
| 1505 | 1887 | TYKNWFPGPMGRTQG | | | | X | Q9YIJ1 |
| 1506 | 1888 | YATLNRDNTENPTER | | | | X | Q9YIJ1 |
| 1507 | 1889 | YGYATLNRDNTENPT | | | | X | Q9YIJ1 |
| 1508 | 1890 | YRFVSTNNTGGVQFN | | | | X | Q9YIJ1 |
| 1509 | 1891 | YSTPWGYFDFNRFHS | | | | X | Q9YIJ1 |

### Example 19: Screen for Anti-AAV Antibodies in Human Sera Based on Cyclic Peptides

[0428] More than 1200 cyclic peptides derived from the sequences of human and rhesus monkey AAV sequences and artificial AAV sequences according to Table 2 and with a sequence length of 14 amino-acids each were synthesized.

[0429] Samples obtained from human donors were screened for antibodies against these AAV-derived peptides immobilized on microarrays. To this end, IgG was prepared from blood obtained from the human donors by protein G purification. Each IgG sample was incubated with the peptide microarrays and Ig binding signals were detected by fluorescence. All antibody binding signals to the peptides on the arrays were background subtracted and ranked for each sample and a deduplicated aggregate of the respective top 250 peptide hits for each donor with the corresponding protein sequence of origin (as obtained from UniProt or other sources) was compiled (designated as group II). Further, the deduplicated aggregate of the respective top 50 peptide hits for each donor was compiled and designated as group I.

[0430] Detailed results are shown in Table 2 below. Altogether, group I contains 47 distinct peptide hits (assigned to the corresponding AAV vectors in Table 2) and group II yielded 172 distinct peptide hits. Evidently, group I is a subset of group II.

[0431] Thus, all listed peptides, preferably peptides belonging to group I, provide sequences from which shorter peptide sequences can be derived for antibody depletion according to the present invention. Furthermore, also other peptide sequences (or fragments) from the proteins from which the peptides of Table 2 were derived (preferably from group I), are suited to be used for SADCs according to the present invention. In addition, these peptides can also be used as probes for the diagnostic detection of anti-AAV antibodies in biological samples such as human sera.

### Table 2

[0432] This table lists the detailed results of a screen for circularized peptides as a basis for the construction of anti-AAV antibody depleting SADCs according to the present invention. These peptides are also suitable for typing neutralizing antibodies directed against AAV gene therapy vectors. If not stated otherwise, the peptides represent fragments from different AAV VP1 proteins. Source given is either UniProt ID, GenBank ID, PDB ID or AAV strain name.

| peptide # | SEQ ID NO | peptide | group I | group II | source |
|---|---|---|---|---|---|
| 1 | 1892 | DSQWLGDRVITTST | X | X | AAVLK03.L125I |
| 2 | 1893 | DTNGVYSEPRPIGT | X | X | AAVLK03.L1251 |
| 3 | 1894 | STNLQRGNLALGET | X | X | AOD99651.1 |
| 4 | 1895 | ANNLTSTVQIFADS | X | X | A9RAI0 |
| 5 | 1896 | KIFNIQVKEVTTSN | X | X | A9RAI0 |
| 6 | 1897 | GNTSQQQTDRNAFY | X | X | 041855 |
| 7 | 1898 | LEDNLSEGIREWWD | X | X | AAO88201.1 |
| 8 | 1899 | SESVPDPQPIGEPP | X | X | AAO88201.1 |
| 9 | 1900 | LIKNTPVPADPPTT | X | X | AAO88201.1 |
| 10 | 1901 | PQYGYLTLNNGSQA | X | X | AAO88201.1 |
| 11 | 1902 | DEEEIRTTNPVATE | X | X | AAVLK03.L125I |
| 12 | 1903 | NYNKSVNVDFTVDT | X | X | AAVLK03.L125I |
| 13 | 1904 | YHLNGRDSLVNPGP | X | X | AAVLK03.L125I |
| 14 | 1905 | TRPATAPQIGTVNS | X | X | AOD99652.1 |
| 15 | 1906 | GETTRPATAAQTQV | X | X | AOD99656.1 |
| 16 | 1907 | IFNIQVKEVTTSNG | X | X | A9RAI0 |
| 17 | 1908 | SNSQLIFAGPNPSG | X | X | A9RAI0 |
| 18 | 1909 | TTTSSNNLLFTSEE | X | X | A9RAI0 |
| 19 | 1910 | FNIQVKEVTTNDGV | X | X | 056137 |
| 20 | 1911 | GQTGDSESVPDPQP | X | X | AAO88201.1 |
| 21 | 1912 | PQILIKNTPVPADP | X | X | AAO88201.1 |
| 22 | 1913 | QLKAGDNPYLRYNH | X | X | AAO88201.1 |
| 23 | 1914 | SFITQYSTGQVSVE | X | X | AAO88201.1 |
| 24 | 1915 | FGKQGAGRDNVDYS | X | X | AAS99285.1 |
| 25 | 1916 | YYKSTNVDFAVNTE | X | X | AAS99285.1 |
| 26 | 1917 | HYFGYSTPWGYFDF | X | X | AAVLK03.L125I |
| 27 | 1918 | APGKKRPVDQSPQE | X | X | AAVLK03.L125I |
| 28 | 1919 | GKKRPVDQSPQEPD | X | X | AAVLK03.L125I |
| 29 | 1920 | KTAPGKKRPVDQSP | X | X | AAVLK03.L125I |
| 30 | 1921 | PEIQYTSNYNKSVN | X | X | AAVLK03.L125I |
| 31 | 1922 | SESVPDPQPLGEPP | X | X | AAVLK03.L125I |
| 32 | 1923 | TAPGKKRPVDQSPQ | X | X | AAVLK03.L1251 |
| 33 | 1924 | YDQQLKAGDNPYLK | X | X | AAVLK03.L125I |
| 34 | 1925 | YLYYLNRTQGTTSG | X | X | AAVLK03.L125I |
| 35 | 1926 | DKAYDRQLDSGDNP | X | X | AAV2i8 |
| 36 | 1927 | GTNTMATGSGAPMA | X | X | AAV2i8 |
| 37 | 1928 | DKAYDQQLQAGDNP | X | X | AAV-Rh74 |
| 38 | 1929 | TESVPDPQPIGEPP | X | X | ALU85156.1 |
| 39 | 1930 | KNTPVPADPPTTES | X | X | AAO88201.1 |
| 40 | 1931 | PVPADPPTTESQAK | X | X | AAO88201.1 |
| 41 | 1932 | DEEEIKATNPVATE | X | X | 056137 |
| 42 | 1933 | DKDKFFPMSGVMIF | X | X | 056137 |
| 43 | 1934 | LQQQNTAPQIGTVN | X | X | Q8JQF8 |
| 44 | 1935 | EEEIKTTNPVATEE | X | X | Q8JQF8 |
| 45 | 1936 | GQNNNSNFAWTAGT | X | X | Q8JQF8 |
| 46 | 1937 | DDEDKFFPMSGVMI | X | X | Q9WBP8 |
| 47 | 1938 | PLVDQYLYRFVSTN | X | X | Q9YIJ1 |
| 48 | 1939 | ADPPTTFSQAKLAS | | X | AAO88201.1 |
| 49 | 1940 | DAAALEHDKAYDQQ | | X | AAO88201.1 |
| 50 | 1941 | DKAYDQQLKAGDNP | | X | AAO88201.1 |
| 51 | 1942 | DSESVPDPQPIGEP | | X | AAO88201.1 |
| 52 | 1943 | DWLEDNLSEGIREW | | X | AAO88201.1 |
| 53 | 1944 | EDNLSEGIREWWDL | | X | AAO88201.1 |
| 54 | 1945 | EEIKTTNPVATEQY | | X | AAO88201.1 |
| 55 | 1946 | ENSKRWNPEIQYTS | | X | AAO88201.1 |
| 56 | 1947 | ESVPDPQPIGEPPA | | X | AAO88201.1 |
| 57 | 1948 | EYQLPYVLGSAHQG | | X | AAO88201.1 |
| 58 | 1949 | FQERLQEDTSFGGN | | X | AAO88201.1 |
| 59 | 1950 | GDSESVPDPQPIGE | | X | AAO88201.1 |
| 60 | 1951 | HSQSLDRLMNPLID | | X | AAO88201.1 |
| 61 | 1952 | KGEPVNAADAAALE | | X | AAO88201.1 |
| 62 | 1953 | KNTPVPADPPTTFS | | X | AAO88201.1 |
| 63 | 1954 | LPYVLGSAHQGCLP | | X | AAO88201.1 |
| 64 | 1955 | LQQQNAAPIVGAVN | | X | AAO88201.1 |
| 65 | 1956 | NAADAAALEHDKAY | | X | AAO88201.1 |
| 66 | 1957 | NPGVAMATHKDDEE | | X | AAO88201.1 |
| 67 | 1958 | PGAPKPKANQQKQD | | X | AAO88201.1 |
| 68 | 1959 | PPQILIKNTPVPAD | | X | AAO88201.1 |
| 69 | 1960 | PRDWQRLINNNWGF | | X | AAO88201.1 |
| 70 | 1961 | PWGYFDFNRFHCHF | | X | AAO88201.1 |
| 71 | 1962 | QLPYVLGSAHQGCL | | X | AAO88201.1 |
| 72 | 1963 | QQRVSTTLSQNNNS | | X | AAO88201.1 |
| 73 | 1964 | SEPRPIGTRYLTRN | | X | AAO88201.1 |
| 74 | 1965 | SGGSTNDNTYFGYS | | X | AAO88201.1 |
| 75 | 1966 | SQSLDRLMNPLIDQ | | X | AAO88201.1 |
| 76 | 1967 | TGDSESVPDPQPIG | | X | AAO88201.1 |
| 77 | 1968 | TIANNLTSTIQVFT | | X | AAO88201.1 |
| 78 | 1969 | TQYSTGQVSVEIEW | | X | AAO88201.1 |
| 79 | 1970 | VTQNEGTKTIANNL | | X | AAO88201.1 |
| 80 | 1971 | WLEDNLSEGIREWW | | X | AAO88201.1 |
| 81 | 1972 | YFGYSTPWGYFDFN | | X | AAO88201.1 |
| 82 | 1973 | LSRTQSTGGTQGTQ | | X | AAS99285.1 |
| 83 | 1974 | TQGTQQLLFSQAGP | | X | AAS99285.1 |
| 84 | 1975 | DAEFQERLKEDTSF | | X | AAVLK03.L1251 |
| 85 | 1976 | DDEEKFFPMHGNLI | | X | AAVLK03.L1251 |
| 86 | 1977 | DGHFHPSPLMGGFG | | X | AAVLK03.L1251 |
| 87 | 1978 | DSESVPDPQPLGEP | | X | AAVLK03.L1251 |
| 88 | 1979 | EEEIRTTNPVATEQ | | X | AAVLK03.L1251 |
| 89 | 1980 | EEIRTTNPVATEQY | | X | AAVLK03.L1251 |
| 90 | 1981 | FQERLKEDTSFGGN | | X | AAVLK03.L1251 |
| 91 | 1982 | GADGVGNSSGNWHC | | X | AAVLK03.L1251 |
| 92 | 1983 | GDSESVPDPQPLGE | | X | AAVLK03.L1251 |
| 93 | 1984 | GNGLDKGEPVNAAD | | X | AAVLK03.L1251 |
| 94 | 1985 | KKRPVDQSPQEPDS | | X | AAVLK03.L1251 |
| 95 | 1986 | KRPVDQSPQEPDSS | | X | AAVLK03.L1251 |
| 96 | 1987 | KSVNVDFTVDTNGV | | X | AAVLK03.L1251 |
| 97 | 1988 | LSKTANDNNNSNFP | | X | AAVLK03.L1251 |
| 98 | 1989 | MASHKDDEEKFFPM | | X | AAVLK03.L1251 |
| 99 | 1990 | NNFQFSYTFEDVPF | | X | AAVLK03.L1251 |
| 100 | 1991 | PVDQSPQEPDSSSG | | X | AAVLK03.L1251 |
| 101 | 1992 | PVPANPPTTFSPAK | | X | AAVLK03.L1251 |
| 102 | 1993 | QQRLSKTANDNNNS | | X | AAVLK03.L1251 |
| 103 | 1994 | QSSNTAPTTRTVND | | X | AAVLK03.L1251 |
| 104 | 1995 | SKTANDNNNSNFPW | | X | AAVLK03.L125I |
| 105 | 1996 | SNYNKSVNVDFTVD | | X | AAVLK03.L1251 |
| 106 | 1997 | TTSGTTNQSRLLFS | | X | AAVLK03.L1251 |
| 107 | 1998 | VMITDEEEIRTTNP | | X | AAVLK03.L1251 |
| 108 | 1999 | APGKKRPVEHSPVE | | X | AAV2i8 |
| 109 | 2000 | FFPQSGVLIFGKQG | | X | AAV2i8 |
| 110 | 2001 | FGKQGSEKTNVDIE | | X | AAV2i8 |
| 111 | 2002 | HKDDEEKFFPQSGV | | X | AAV2i8 |
| 112 | 2003 | KGEPVNEADAAALE | | X | AAV2i8 |
| 113 | 2004 | NEADAAALEHDKAY | | X | AAV2i8 |
| 114 | 2005 | NPVATEQYGSVSTN | | X | AAV2i8 |
| 115 | 2006 | PQILIKNTPVPANP | | X | AAV2i8 |
| 116 | 2007 | QQRVSKTSADNNNS | | X | AAV2i8 |
| 117 | 2008 | QTGDADSVPDPQPL | | X | AAV2i8 |
| 118 | 2009 | ADPPTTFNQAKLAS | | X | AAV-Rh74 |
| 119 | 2010 | AGDNVDYSSVMLTS | | X | AAV-Rh74 |
| 120 | 2011 | KNTPVPADPPTTFN | | X | AAV-Rh74 |
| 121 | 2012 | KRVLEPLGLVESPV | | X | AAV-Rh74 |
| 122 | 2013 | PYLRYHADAEFQER | | X | AAV-Rh74 |
| 123 | 2014 | EEEIKTTNPVATES | | X | ALU85156.1 |
| 124 | 2015 | EFAWPGASSWALNG | | X | ALU85156.1 |
| 125 | 2016 | KSNNVEFAVNTEGV | | X | ALU85156.1 |
| 126 | 2017 | MNPGPAMASHKEGE | | X | ALU85156.1 |
| 127 | 2018 | PVPADPPTAFNKDK | | X | ALU85156.1 |
| 128 | 2019 | TVQVFTDSDYQLPY | | X | ALU85156.1 |
| 129 | 2020 | NLQAANLALGETTR | | X | AOD99656.1 |
| 130 | 2021 | GGQMATNNQSLALG | | X | AOD99659.1 |
| 131 | 2022 | MATNNQSLALGETT | | X | AOD99659.1 |
| 132 | 2023 | KKRILEPLGLVEEA | | X | AAB95452.1 |
| 133 | 2024 | ADPPTTFNQSKLNS | | X | 3J1Q |
| 134 | 2025 | KSTSVDFAVNTEGV | | X | 3J1Q |
| 135 | 2026 | LQRGNRQAATADVN | | X | 3J1Q |
| 136 | 2027 | PVPADPPTTFNQSK | | X | 3J1Q |
| 137 | 2028 | DDDDRFFPMHGNLI | | X | QLI60567.1 |
| 138 | 2029 | PEPADVFMIPQYGY | | X | AAO88201.1 |
| 139 | 2030 | DIYYQGPIWAKVPH | | X | A9RAI0 |
| 140 | 2031 | FEKVPFHSMYAHSQ | | X | A9RAI0 |
| 141 | 2032 | FSAARINSFLTQYS | | X | A9RAI0 |
| 142 | 2033 | HSQSLDRMMNPLLD | | X | A9RAI0 |
| 143 | 2034 | KKRILEPLGLVEEG | | X | A9RAI0 |
| 144 | 2035 | MVPQYGYCGVVTGK | | X | A9RAI0 |
| 145 | 2036 | NQTDRNAFYCLEYF | | X | A9RAI0 |
| 146 | 2037 | RDTDMFGQIADNNQ | | X | A9RAI0 |
| 147 | 2038 | RDWQRLINNNWGLR | | X | A9RAI0 |
| 148 | 2039 | TVQIFADSTYELPY | | X | A9RAI0 |
| 149 | 2040 | DIYYQGPIWAKIPH | | X | 041855 |
| 150 | 2041 | QIFADSSYELPYVM | | X | 041855 |
| 151 | 2042 | THSTLDGRWSALTP | | X | 041855 |
| 152 | 2043 | TVQIFADSSYELPY | | X | 041855 |
| 153 | 2044 | DKFFPMSGVMIFGK | | X | 056137 |
| 154 | 2045 | EEEIKATNPVATER | | X | 056137 |
| 155 | 2046 | EGADGVGNASGNWH | | X | 056137 |
| 156 | 2047 | LFNIQVKEVTTNDG | | X | 056137 |
| 157 | 2048 | QVKEVTTNDGVTTI | | X | 056137 |
| 158 | 2049 | RVSKTKTDNNNSNF | | X | 056137 |
| 159 | 2050 | SDSEYQLPYVLGSA | | X | 056137 |
| 160 | 2051 | HSQSLDRLMNPLLD | | X | Q5Y9B2 |
| 161 | 2052 | IEMRAAPGGNAVDA | | X | Q5Y9B2 |
| 162 | 2053 | KRLNFEEDTGAGDG | | X | Q5Y9B2 |
| 163 | 2054 | SQSLDRLMNPLLDQ | | X | Q5Y9B2 |
| 164 | 2055 | STGQVAVQIEWEIE | | X | Q5Y9B2 |
| 165 | 2056 | TTSANNLLFTSEEE | | X | Q5Y9B2 |
| 166 | 2057 | TTSGETLNQGNAAT | | X | Q5Y9B2 |
| 167 | 2058 | GESESVPDPQPIGE | | X | Q5Y9B4 |
| 168 | 2059 | GQTGESESVPDPQP | | X | Q5Y9B4 |
| 169 | 2060 | ANPGIAMATHKDDE | | X | Q8JQF8 |
| 170 | 2061 | EGASYQVPPQPNGM | | X | Q9YIJ1 |
| 171 | 2062 | EYRTTRPIGTRYLT | | X | Q9YIJ1 |
| 172 | 2063 | YNLQEIVPGSVWME | | X | Q9YIJ1 |

### Example 20: Further Screen for Anti-AAV Antibodies in Human Sera

[0433] By using a cumulative gliding average signal of all sera tested over 4 consecutively aligned peptide signals along the corresponding AAV sequences, 1948 linear peptides were derived from AAV vectors AAV1, AAV2, AAV5, AAV6, AAV8, AAV9 and AAVrh.10.

[0434] Detailed results are shown in Table 3 below. 63 top candidates with the strongest signals were assigned to group I corresponding to 3.2 % of all AAV peptides analyzed by gliding average signal along the AAV VP1 sequence. The peptides of group I as well as the 135 peptides with second strongest signals were assigned to group II corresponding to 10.1 % of all AAV peptides analyzed. Additional 82 peptides (assigned to group III) were derived from the top 200 ranked peptide signals of the present screen not covered by group I and II. In summary, groups I, II and III thus contain 280 linear peptides suitable (as basis for SADCs) to remove or to detect anti AAV antibodies, in particular antibodies directed against the AAV1, AAV2, AAV5, AAV6, AAV8, AAV9 and AAVrh.10 VP1 proteins.

### Table 3

[0435] This table provides a separate compilation of suitable peptides covering stretches along the VP1 sequence of widely used AAV vectors including AAV1, AAV2, AAV5, AAV6, AAV8, AAV9 and AAVrh.10. Source given is either UniProt ID, GenBank ID, PDB ID or AAV strain name. The asterisk (*) indicates peptide sequences for which a SEQ ID NO has already been assigned in Table 1 above.

| peptide # | SEQ ID NO | peptide | group I | group II | group III | source |
|---|---|---|---|---|---|---|
| 1 | ∗ | ADPPTAFNKDKLNSF | X | X | | Q6JC40 |
| 2 | 2064 | ADTMSAGGGGPLGDN | X | X | | Q9YIJ1 |
| 3 | ∗ | AEFQERLKEDTSFGG | X | X | | spP03135 |
| 4 | 2065 | AKTAPGKKRPVEPSP | X | X | | Q8JQF8 |
| 5 | ∗ | APTGKRIDDHFPKRK | X | X | | Q9YIJ1 |
| 6 | ∗ | DKLNSFITQYSTGQV | X | X | | Q6JC40 |
| 7 | 2066 | DVYLQGPIWAKIPET | X | X | | Q9YIJ1 |
| 8 | ∗ | EEEIKTTNPVATEEY | X | X | | Q8JQF8 |
| 9 | ∗ | EEEIKTTNPVATEQY | X | X | | AAO88201.1 |
| 10 | ∗ | EEEIRTTNPVATEQY | X | X | | spP03135 |
| 11 | ∗ | EEIKTTNPVATEQYG | X | X | | AAO88201.1 |
| 12 | ∗ | EIKTTNPVATEEYGI | X | X | | Q8JQF8 |
| 13 | ∗ | EIRTTNPVATEQYGS | X | X | | spP03135 |
| 14 | ∗ | ELKKENSKRWNPEIQ | X | X | | Q9YIJ1 |
| 15 | ∗ | EMEWELKKENSKRWN | X | X | | Q9YIJ1 |
| 16 | ∗ | ERDVYLQGPIWAKIP | X | X | | Q9YIJ1 |
| 17 | ∗ | ERLKEDTSFGGNLGR | X | X | | spP03135 |
| 18 | ∗ | EWELKKENSKRWNPE | X | X | | Q9YIJ1 |
| 19 | ∗ | FITQYSTGQVSVEIE | X | X | | spP03135 |
| 20 | ∗ | FITQYSTGQVTVEME | X | X | | Q9YIJ1 |
| 21 | ∗ | FQERLKEDTSFGGNL | X | X | | spP03135 |
| 22 | 2067 | GAKTAPTGKRIDDHF | X | X | | Q9YIJ1 |
| 23 | 2068 | GQVATNHQSAQAQAQ | X | X | | Q6JC40 |
| 24 | ∗ | IKTTNPVATEQYGVV | X | X | | AAO88201.1 |
| 25 | ∗ | IQYTSNYNKSVNVDF | X | X | | spP03135 |
| 26 | ∗ | KKENSKRWNPEIQYT | X | X | | Q9YIJ1 |
| 27 | ∗ | KLNSFITQYSTGQVS | X | X | | Q6JC40 |
| 28 | 2069 | KTAPTGKRIDDHFPK | X | X | | Q9YIJ1 |
| 29 | ∗ | KTTNPVATEEYGIVA | X | X | | Q8JQF8 |
| 30 | ∗ | LKEDTSFGGNLGRAV | X | X | | spP03135 |
| 31 | ∗ | LNSFITQYSTGQVSV | X | X | | Q6JC40 |
| 32 | 2070 | MNPLIDQYLYYLSKT | X | X | | Q6JC40 |
| 33 | 2071 | NHQYREIKSGSVDGS | X | X | | Q9YIJ1 |
| 34 | ∗ | NSFITQYSTGQVSVE | X | X | | Q6JC40 |
| 35 | ∗ | NTEGVYSEPRPIGTR | X | X | | Q6JC40 |
| 36 | ∗ | PADPPTAFNKDKLNS | X | X | | Q6JC40 |
| 37 | ∗ | PEIQYTSNYNKSVNV | X | X | | spP03135 |
| 38 | ∗ | PLIDQYLYYLSKTIN | X | X | | Q6JC40 |
| 39 | 2072 | PTTFNQSKLNSFITQ | X | X | | Q8JQF8 |
| 40 | ∗ | PVPADPPTAFNKDKL | X | X | | Q6JC40 |
| 41 | ∗ | QGPIWAKIPETGAHF | X | X | | Q9YIJ1 |
| 42 | 2073 | QYREIKSGSVDGSNA | X | X | | Q9YIJ1 |
| 43 | ∗ | REIKSGSVDGSNANA | X | X | | Q9YIJ1 |
| 44 | ∗ | RTTNPVATEQYGSVS | X | X | | spP03135 |
| 45 | ∗ | SEEEIKTTNPVATEQ | X | X | | AAO88201.1 |
| 46 | ∗ | SFITQYSTGQVSVEI | X | X | | spP03135 |
| 47 | ∗ | SSFITQYSTGQVTVE | X | X | | Q9YIJ1 |
| 48 | ∗ | SSVMLTSEEEIKTTN | X | X | | AAO88201.1 |
| 49 | ∗ | SSYAHSQSLDRLMNP | X | X | | spP03135 |
| 50 | ∗ | SVMLTSEEEIKTTNP | X | X | | AAO88201.1 |
| 51 | 2074 | SYAHSQSLDRLMNPL | X | X | | spP03135 |
| 52 | ∗ | TMSAGGGGPLGDNNQ | X | X | | Q9YIJ1 |
| 53 | ∗ | TNPVATEEYGIVADN | X | X | | Q8JQF8 |
| 54 | ∗ | TNPVATEQYGSVSTN | X | X | | spP03135 |
| 55 | ∗ | TQTTGGTANTQTLGF | X | X | | Q8JQF8 |
| 56 | ∗ | TTNPVATEQYGVVAD | X | X | | AAO88201.1 |
| 57 | ∗ | VPADPPTAFNKDKLN | X | X | | Q6JC40 |
| 58 | 2075 | VYSEPRPIGTRYLTR | X | X | | spP03135 |
| 59 | ∗ | WNPEIQYTSNYNKSV | X | X | | spP03135 |
| 60 | 2076 | YLQGPIWAKIPETGA | X | X | | Q9YIJ1 |
| 61 | ∗ | YNNHQYREIKSGSVD | X | X | | Q9YIJ1 |
| 62 | ∗ | YSSVMLTSEEEIKTT | X | X | | AAO88201.1 |
| 63 | ∗ | YTSNYNKSVNVDFTV | X | X | | spP03135 |
| 64 | ∗ | ADAEFQERLKEDTSF | | X | | spP03135 |
| 65 | ∗ | AGPPKPKPNQQHQDQ | | X | | Q9YIJ1 |
| 66 | ∗ | AGPSGLGSGTMAAGG | | X | | AAO88201.1 |
| 67 | ∗ | ANNLTSTVQVFTDDD | | X | | Q9YIJ1 |
| 68 | ∗ | CYRQQRVSTTTGQNN | | X | | Q8JQF8 |
| 69 | ∗ | DPPTTFNQSKLNSFI | | X | | Q8JQF8 |
| 70 | 2077 | DSSSGTGKAGQQPAR | | X | | spP03135 |
| 71 | ∗ | DSTTTIANNLTSTVQ | | X | | Q9YIJ1 |
| 72 | ∗ | EDTSFGGNLGRAVFQ | | X | | spP03135 |
| 73 | ∗ | EEGAKTAPGKKRPVE | | X | | Q8JQF8 |
| 74 | ∗ | EEGAKTAPTGKRIDD | | X | | Q9YIJ1 |
| 75 | ∗ | EEIKTTNPVATESYG | | X | | Q6JC40 |
| 76 | ∗ | EFENVPFHSSYAHSQ | | X | | Q6JC40 |
| 77 | ∗ | EGAKTAPGKKRPVEP | | X | | Q8JQF8 |
| 78 | ∗ | EGLREFLGLEAGPPK | | X | | Q9YIJ1 |
| 79 | ∗ | EIQYTSNYYKSTNVD | | X | | AAO88201.1 |
| 80 | ∗ | EKTNVDIEKVMITDE | | X | | spP03135 |
| 81 | ∗ | ELQKENSKRWNPEIQ | | X | | spP03135 |
| 82 | ∗ | ENSKRWNPEIQYTNN | | X | | Q9YIJ1 |
| 83 | ∗ | ENVPFHSSYAHSQSL | | X | | Q6JC40 |
| 84 | ∗ | EPDSSSGTGKAGQQP | | X | | spP03135 |
| 85 | ∗ | EQLEAGDNPYLKYNH | | X | | Q9YIJ1 |
| 86 | ∗ | EWELQKENSKRWNPE | | X | | spP03135 |
| 87 | ∗ | GAKTAPGKKRPVEPS | | X | | Q8JQF8 |
| 88 | ∗ | GEPPAGPSGLGSGTM | | X | | AAO88201.1 |
| 89 | ∗ | GGTANTQTLGFSQGG | | X | | Q8JQF8 |
| 90 | ∗ | GSEKTNVDIEKVMIT | | X | | spP03135 |
| 91 | 2078 | GVVADNLQQQNAAPI | | X | | AAO88201.1 |
| 92 | ∗ | GVYSEPRPIGTRYLT | | X | | spP03135 |
| 93 | 2079 | HSSFAPSQNLFKLAN | | X | | Q9YIJ1 |
| 94 | ∗ | HSSYAHSQSLDRLMN | | X | | spP03135 |
| 95 | ∗ | IKNTPVPADPPTAFN | | X | | Q6JC40 |
| 96 | ∗ | IKTTNPVATESYGQV | | X | | Q6JC40 |
| 97 | ∗ | ILIKNTPVPADPPTA | | X | | Q6JC40 |
| 98 | ∗ | IQYTSNYYKSNNVEF | | X | | Q6JC40 |
| 99 | ∗ | IQYTSNYYKSTNVDF | | X | | AAO88201.1 |
| 100 | ∗ | ITNEEEIKTTNPVAT | | X | | Q6JC40 |
| 101 | ∗ | ITQYSTGQVSVEIEW | | X | | spP03135 |
| 102 | 2080 | KDKLNSFITQYSTGQ | | X | | Q6JC40 |
| 103 | ∗ | KNTPVPADPPTAFNK | | X | | Q6JC40 |
| 104 | ∗ | KRWNPEIQYTSNYNK | | X | | spP03135 |
| 105 | 2081 | KRWNPEIQYTSNYYK | | X | | Q6JC40 |
| 106 | 2082 | LEAGDNPYLKYNHAD | | X | | Q9YIJ1 |
| 107 | ∗ | LEAGPPKPKPNQQHQ | | X | | Q9YIJ1 |
| 108 | ∗ | LGADTMSAGGGGPLG | | X | | Q9YIJ1 |
| 109 | ∗ | LGLEAGPPKPKPNQQ | | X | | Q9YIJ1 |
| 110 | ∗ | LIKNTPVPADPPTAF | | X | | Q6JC40 |
| 111 | 2083 | LKYNHADAEFQEKLA | | X | | Q9YIJ1 |
| 112 | ∗ | LQKENSKRWNPEIQY | | X | | spP03135 |
| 113 | ∗ | LREFLGLEAGPPKPK | | X | | Q9YIJ1 |
| 114 | ∗ | LYYLSRTNTPSGTTT | | X | | spP03135 |
| 115 | ∗ | NEEEIKTTNPVATES | | X | | Q6JC40 |
| 116 | ∗ | NKDKLNSFITQYSTG | | X | | Q6JC40 |
| 117 | ∗ | NNSNFAWTAGTKYHL | | X | | Q8JQF8 |
| 118 | ∗ | NPVATEQYGVVADNL | | X | | AAO88201.1 |
| 119 | ∗ | NPVATESYGQVATNH | | X | | Q6JC40 |
| 120 | 2084 | NSQGALPGMVWQNRD | | X | | Q8JQF8 |
| 121 | ∗ | NTPVPADPPTAFNKD | | X | | Q6JC40 |
| 122 | ∗ | NTPVPADPPTTFNQS | | X | | Q8JQF8 |
| 123 | 2085 | PADPPTTFNQSKLNS | | X | | Q8JQF8 |
| 124 | ∗ | PFHSSFAPSQNLFKL | | X | | Q9YIJ1 |
| 125 | ∗ | PIGEPPAGPSGLGSG | | X | | AAO88201.1 |
| 126 | 2086 | PPAGPSGLGSGTMAA | | X | | AAO88201.1 |
| 127 | ∗ | PQILIKNTPVPADPP | | X | | Q6JC40 |
| 128 | ∗ | PQYGYATLNRDNTEN | | X | | Q9YIJ1 |
| 129 | ∗ | PSTSSDAEAGPSGSQ | | X | | Q9YIJ1 |
| 130 | ∗ | PVATEQYGSVSTNLQ | | X | | spP03135 |
| 131 | ∗ | PVEPDSSSGTGKAGQ | | X | | spP03135 |
| 132 | ∗ | PVPADPPTTFNQSKL | | X | | Q8JQF8 |
| 133 | ∗ | PVPGNITSFSDVPVS | | X | | Q9YIJ1 |
| 134 | 2087 | PYLKYNHADAEFQEK | | X | | Q9YIJ1 |
| 135 | ∗ | QILIKNTPVPADPPT | | X | | Q6JC40 |
| 136 | ∗ | QRVSTTTGQNNNSNF | | X | | Q8JQF8 |
| 137 | 2088 | QSGASNDNHYFGYST | | X | | spP03135 |
| 138 | 2089 | QSTGGTAGTQQLLFS | | X | | AAO88201.1 |
| 139 | ∗ | QVTVEMEWELKKENS | | X | | Q9YIJ1 |
| 140 | 2090 | QYGVVADNLQQQNAA | | X | | AAO88201.1 |
| 141 | ∗ | QYTSNYYKSNNVEFA | | X | | Q6JC40 |
| 142 | ∗ | RQQRVSTTTGQNNNS | | X | | Q8JQF8 |
| 143 | 2091 | RWNPEIQYTSNYYKS | | X | | Q6JC40 |
| 144 | 2092 | SFAPSQNLFKLANPL | | X | | Q9YIJ1 |
| 145 | ∗ | SGNWHCDSTWLGDRV | | X | | Q8JQF8 |
| 146 | 2093 | SKRWNPEIQYTSNYY | | X | | Q6JC40 |
| 147 | ∗ | SNYNKSVNVDFTVDT | | X | | spP03135 |
| 148 | 2094 | SQSGASNDNHYFGYS | | X | | spP03135 |
| 149 | 2095 | SRTNTPSGTTTQSRL | | X | | spP03135 |
| 150 | ∗ | SSGNWHCDSTWLGDR | | X | | Q8JQF8 |
| 151 | ∗ | SSGTGKAGQQPARKR | | X | | spP03135 |
| 152 | ∗ | SSLGADTMSAGGGGP | | X | | Q9YIJ1 |
| 153 | ∗ | SSQSGASNDNHYFGY | | X | | spP03135 |
| 154 | ∗ | SSSGNWHCDSTWLGD | | X | | Q8JQF8 |
| 155 | ∗ | STGGTAGTQQLLFSQ | | X | | AAO88201.1 |
| 156 | ∗ | STTLSQNNNSNFAWT | | X | | AAO88201.1 |
| 157 | 2096 | SYGQVATNHQSAQAQ | | X | | Q6JC40 |
| 158 | 2097 | TANTQTLGFSQGGPN | | X | | Q8JQF8 |
| 159 | ∗ | TEGVYSEPRPIGTRY | | X | | Q6JC40 |
| 160 | 2098 | TEQYGVVADNLQQQN | | X | | AAO88201.1 |
| 161 | ∗ | TESYGQVATNHQSAQ | | X | | Q6JC40 |
| 162 | ∗ | TGGTAGTQQLLFSQA | | X | | AAO88201.1 |
| 163 | 2099 | TGQNNNSNFAWTAGT | | X | | Q8JQF8 |
| 164 | ∗ | TLNRDNTENPTERSS | | X | | Q9YIJ1 |
| 165 | ∗ | TLSQNNNSNFAWTGA | | X | | AAO88201.1 |
| 166 | ∗ | TNGVYSEPRPIGTRY | | X | | spP03135 |
| 167 | ∗ | TNTPSGTTTQSRLQF | | X | | spP03135 |
| 168 | ∗ | TNVDIEKVMITDEEE | | X | | spP03135 |
| 169 | ∗ | TQSTGGTAGTQQLLF | | X | | AAO88201.1 |
| 170 | ∗ | TQYSTGQVSVEIEWE | | X | | spP03135 |
| 171 | ∗ | TQYSTGQVTVEMEWE | | X | | Q9YIJ1 |
| 172 | ∗ | TSNYYKSNNVEFAVN | | X | | Q6JC40 |
| 173 | ∗ | TSSDAEAGPSGSQQL | | X | | Q9YIJ1 |
| 174 | ∗ | TTGGTANTQTLGFSQ | | X | | Q8JQF8 |
| 175 | ∗ | TTLSQNNNSNFAWTG | | X | | AAO88201.1 |
| 176 | 2100 | TTNPVATESYGQVAT | | X | | Q6JC40 |
| 177 | ∗ | TTTGQNNNSNFAWTA | | X | | Q8JQF8 |
| 178 | ∗ | TVEMEWELKKENSKR | | X | | Q9YIJ1 |
| 179 | ∗ | VATEQYGWADNLQQ | | X | | AAO88201.1 |
| 180 | ∗ | VATESYGQVATNHQS | | X | | Q6JC40 |
| 181 | ∗ | VATNHQSAQAQAQTG | | X | | Q6JC40 |
| 182 | ∗ | VDIEKVMITDEEEIR | | X | | spP03135 |
| 183 | ∗ | VDTNGVYSEPRPIGT | | X | | spP03135 |
| 184 | ∗ | VEIEWELQKENSKRW | | X | | spP03135 |
| 185 | ∗ | VNTEGVYSEPRPIGT | | X | | Q6JC40 |
| 186 | ∗ | VQDSTTTIANNLTST | | X | | Q9YIJ1 |
| 187 | ∗ | VSTTLSQNNNSNFAW | | X | | AAO88201.1 |
| 188 | ∗ | VSTTTGQNNNSNFAW | | X | | Q8JQF8 |
| 189 | ∗ | VTVQDSTTTIANNLT | | X | | Q9YIJ1 |
| 190 | 2101 | WTGATKYHLNGRDSL | | X | | spP03135 |
| 191 | 2102 | YAHSQSLDRLMNPLI | | X | | spP03135 |
| 192 | ∗ | YATLNRDNTENPTER | | X | | Q9YIJ1 |
| 193 | * | YGYATLNRDNTENPT | | X | | Q9YIJ1 |
| 194 | ∗ | YLSRTNTPSGTTTQS | | X | | spP03135 |
| 195 | ∗ | YNKSVNVDFTVDTNG | | X | | spP03135 |
| 196 | ∗ | YNNHLYKQISNGTSG | | X | | Q8JQF8 |
| 197 | ∗ | YSTGQVTVEMEWELK | | X | | Q9YIJ1 |
| 198 | 2103 | YTSNYYKSNNVEFAV | | X | | Q6JC40 |
| 199 | ∗ | ASHKDDEEKFFPQSG | | | X | spP03135 |
| 200 | ∗ | ASNDNHYFGYSTPWG | | | X | spP03135 |
| 201 | ∗ | ATERFGTVAVNLQSS | | | X | 056137 |
| 202 | ∗ | AVNLQSSSTDPATGD | | | X | 056137 |
| 203 | ∗ | DAAALEHDKAYDQQL | | | X | Q6JC40 |
| 204 | ∗ | DAEFQERLQEDTSFG | | | X | Q8JQF8 |
| 205 | ∗ | DDEEKFFPQSGVLIF | | | X | spP03135 |
| 206 | ∗ | EDSKPSTSSDAEAGP | | | X | Q9YIJ1 |
| 207 | ∗ | EDVPFHSSYAHSQSL | | | X | spP03135 |
| 208 | ∗ | EEEIKATNPVATERF | | | X | Q9WBP8 |
| 209 | ∗ | EEVGEGLREFLGLEA | | | X | Q9YIJ1 |
| 210 | ∗ | EEYGIVADNLQQQNT | | | X | Q8JQF8 |
| 211 | ∗ | EFLGLEAGPPKPKPN | | | X | Q9YIJ1 |
| 212 | ∗ | EHDKAYDQQLKAGDN | | | X | Q6JC40 |
| 213 | ∗ | EHDKAYDRQLDSGDN | | | X | spP03135 |
| 214 | ∗ | EIKATNPVATERFGT | | | X | Q9WBP8 |
| 215 | ∗ | EPDSSAGIGKSGAQP | | | X | Q6JC40 |
| 216 | ∗ | EPVNAADAAALEHDK | | | X | Q6JC40 |
| 217 | ∗ | EPVNEADAAALEHDK | | | X | spP03135 |
| 218 | ∗ | ERHKDDSRGLVLPGY | | | X | spP03135 |
| 219 | ∗ | ESVPDPQPIGEPPAA | | | X | Q6JC40 |
| 220 | ∗ | EVPFHSSFAPSQNLF | | | X | Q9YIJ1 |
| 221 | ∗ | FHSSYAHSQSLDRLM | | | X | spP03135 |
| 222 | ∗ | FNGLDKGEPVNAADA | | | X | Q8JQF8 |
| 223 | ∗ | FNGLDKGEPVNEADA | | | X | spP03135 |
| 224 | ∗ | GEPVNAADAAALEHD | | | X | Q6JC40 |
| 225 | ∗ | GEPVNEADAAALEHD | | | X | spP03135 |
| 226 | ∗ | GNGLDKGEPVNAADA | | | X | Q6JC40 |
| 227 | ∗ | GSAHQGCLPPFPADV | | | X | spP03135 |
| 228 | ∗ | GSSSGNWHCDSTWLG | | | X | Q8JQF8 |
| 229 | ∗ | IGTVNSQGALPGMVW | | | X | Q8JQF8 |
| 230 | ∗ | IQVKEVTTNDGVTTI | | | X | Q9WBP8 |
| 231 | ∗ | LIKNTPVPADPPTTF | | | X | Q8JQF8 |
| 232 | ∗ | LRTGNNFEFSYQFED | | | X | AAO88201.1 |
| 233 | ∗ | NEADAAALEHDKAYD | | | X | spP03135 |
| 234 | ∗ | NNNSEFAWPGASSWA | | | X | Q6JC40 |
| 235 | ∗ | NNSEYSWTGATKYHL | | | X | spP03135 |
| 236 | ∗ | NVGGQMATNNQSSTT | | | X | Q9YIJ1 |
| 237 | ∗ | NYNDPQFVDFAPDST | | | X | Q9YIJ1 |
| 238 | ∗ | PLGEPPATPAAVGPT | | | X | Q9WBP8 |
| 239 | ∗ | PQPLGEPPATPAAVG | | | X | Q9WBP8 |
| 240 | ∗ | PSKMLRTGNNFEFTY | | | X | Q9YIJ1 |
| 241 | ∗ | PVATEEYGIVADNLQ | | | X | Q8JQF8 |
| 242 | ∗ | PVEPSPQRSPDSSTG | | | X | Q8JQF8 |
| 243 | ∗ | PVEQSPQEPDSSSGI | | | X | Q9WBP8 |
| 244 | ∗ | PVNEADAAALEHDKA | | | X | spP03135 |
| 245 | ∗ | PVPANPPAEFSATKF | | | X | Q9WBP8 |
| 246 | ∗ | QQRVSTTLSQNNNSN | | | X | AAO88201.1 |
| 247 | ∗ | QRVSKTKTDNNNSNF | | | X | Q9WBP8 |
| 248 | ∗ | QRVSTTLSQNNNSNF | | | X | AAO88201.1 |
| 249 | ∗ | QSSSTDPATGDVHVM | | | X | 056137 |
| 250 | ∗ | QYTNNYNDPQFVDFA | | | X | Q9YIJ1 |
| 251 | ∗ | RVSTTLSQNNNSNFA | | | X | AAO88201.1 |
| 252 | ∗ | SDSEYQLPYVLGSAH | | | X | Q9WBP8 |
| 253 | ∗ | SESVPDPQPIGEPPA | | | X | AAO88201.1 |
| 254 | ∗ | SESVPDPQPLGEPPA | | | X | Q8JQF8 |
| 255 | ∗ | SFVDHPPDWLEEVGE | | | X | Q9YIJ1 |
| 256 | ∗ | SSNDNAYFGYSTPWG | | | X | Q6JC40 |
| 257 | ∗ | SSSGIGKTGQQPAKK | | | X | Q9WBP8 |
| 258 | ∗ | STTVTQNNNSEFAWP | | | X | Q6JC40 |
| 259 | ∗ | SVPDPQPLGEPPAAP | | | X | Q8JQF8 |
| 260 | ∗ | SVPDPQPLGEPPATP | | | X | Q9WBP8 |
| 261 | ∗ | SYEFENVPFHSSYAH | | | X | Q6JC40 |
| 262 | ∗ | SYTFEDVPFHSSYAH | | | X | spP03135 |
| 263 | ∗ | TDEEEIKATNPVATE | | | X | Q9WBP8 |
| 264 | ∗ | TDEEEIRTTNPVATE | | | X | spP03135 |
| 265 | ∗ | TGNNFEFSYQFEDVP | | | X | AAO88201.1 |
| 266 | ∗ | TMATGSGAPMADNNE | | | X | spP03135 |
| 267 | ∗ | TNNYNDPQFVDFAPD | | | X | Q9YIJ1 |
| 268 | ∗ | TNTMATGSGAPMADN | | | X | spP03135 |
| 269 | ∗ | TPVPADPPTAFNKDK | | | X | Q6JC40 |
| 270 | ∗ | TPVPADPPTTFSQAK | | | X | AAO88201.1 |
| 271 | ∗ | TSTVQVFTDSEYQLP | | | X | spP03135 |
| 272 | ∗ | TSVDFAVNTEGVYSE | | | X | Q8JQF8 |
| 273 | ∗ | TVAVNLQSSSTDPAT | | | X | 056137 |
| 274 | ∗ | VDFAVNTEGVYSEPR | | | X | Q8JQF8 |
| 275 | ∗ | VEFAVNTEGVYSEPR | | | X | Q6JC40 |
| 276 | ∗ | VLEPLGLVEEGAKTA | | | X | Q8JQF8 |
| 277 | ∗ | VNVDFTVDTNGVYSE | | | X | spP03135 |
| 278 | ∗ | VSVEIEWELQKENSK | | | X | spP03135 |
| 279 | ∗ | WLEDNLSEGIREWWD | | | X | Q9WBP8 |
| 280 | ∗ | YNEQLEAGDNPYLKY | | | X | Q9YIJ1 |

### Example 21: Further Screen for Anti-Vector Antibodies in Human Sera

[0436] Out of the 3285 cyclic peptides derived from Ad5 Hexon, fiber and penton proteins P04133, P11818 and P12538, respectively, and AAV VP1 sequences P03135, Q6JC40, Q8JQF8, Q9WBP8, Q9YIJ1, 056137, AAO88201.1, 041855, O56139 and Q8JQG0, the peptides with the top 5% maximal IgG signal strength over the microarray screens were obtained, yielding a total of 164 peptides with top signals from the vector protein sequences screened. The details are shown in Table 4 below.

### Table 4

[0437] This table provides another compilation of viral peptide sequences suitable as a basis for the present invention. Source given is either UniProt ID or GenBank ID. The asterisk (*) indicates peptide sequences for which a SEQ ID NO has already been assigned in Table 2 above.

| peptide # | SEQ ID NO | peptide | source |
|---|---|---|---|
| 1 | 2104 | AAEAAAPAAQPEVE | P12538 |
| 2 | 2105 | AAAPAAQPEVEKPQ | P12538 |
| 3 | 2106 | DASEYLSPGLVQFA | P04133 |
| 4 | 2107 | DGLEFGSPNAPNTN | P11818 |
| 5 | 2108 | APVAAALGSPFDAP | P12538 |
| 6 | 2109 | NLEEEDDDNEDEVD | P04133 |
| 7 | 2110 | EEDDDNEDEVDEQA | P04133 |
| 8 | 2111 | DDNEDEVDEQAEQQ | P04133 |
| 9 | 2112 | VLQSSLGNDLRVDG | P04133 |
| 10 | 2113 | PSEDTFNPVYPYDT | P11818 |
| 11 | 2114 | FPVVGAELLPVHSK | P12538 |
| 12 | 2115 | EEIRPTNPVATEEY | Q8JQG0 |
| 13 | 2116 | SGSGAEENSNAAAA | P12538 |
| 14 | 2117 | YEEGPPPSYESVVS | P12538 |
| 15 | 2118 | NAAAAAMQPVEDMN | P12538 |
| 16 | 2119 | AAALGSPFDAPLDP | P12538 |
| 17 | 2120 | NGVLESDIGVKFDT | P12538 |
| 18 | 2121 | AAAMQPVEDMNDHA | P12538 |
| 19 | 2122 | PAQPASSLGADTMS | Q9YIJ1 |
| 20 | 2123 | TVQVFTDDDYQLPY | Q9YIJ1 |
| 21 | 2124 | PVPGNITSFSDVPV | Q9YIJ1 |
| 22 | 2125 | TQYSTGQVTVEMEW | Q9YIJ1 |
| 23 | 2126 | YLGPGNGLDRGEPV | Q9YIJ1 |
| 24 | 2127 | TSESETQPVNRVAY | Q9YIJ1 |
| 25 | 2128 | RARPSEDTFNPVYP | P11818 |
| 26 | 2129 | ATALEINLEEEDDD | P04133 |
| 27 | 2130 | ENSNAAAAAMQPVE | P12538 |
| 28 | 2131 | YLGPFNGLDKGEPV | P03135 |
| 29 | 2132 | NNFEFSYSFEDVPF | Q8JQG0 |
| 30 | 2133 | SFITQYSTGQVTVE | Q9YIJ1 |
| 31 | 2134 | YNKSVNVDFTVDTN | P03135 |
| 32 | 2135 | LGSPFDAPLDPPFV | P12538 |
| 33 | 2136 | PAAQPEVEKPQKKP | P12538 |
| 34 | 2137 | ENSKRWNPEIQYTN | Q9YIJ1 |
| 35 | 2138 | YLVDNKSTDVASLN | P12538 |
| 36 | 2139 | PPMMLIKNTPVPGN | Q9YIJ1 |
| 37 | 2140 | PVPADPPTTFSQAK | AAO88201.1 |
| 38 | 2141 | DTFNPVYPYDTETG | P11818 |
| 39 | 2142 | ITQYSTGQVTVEME | Q9YIJ1 |
| 40 | 2143 | AGNLTSQNVTTVSP | P11818 |
| 41 | 2144 | NNFTFSYTFEDVPF | P03135 |
| 42 | 2145 | WVLPSYNNHQYREI | Q9YIJ1 |
| 43 | 2146 | YLGPGNGLDKGEPV | Q6JC40 |
| 44 | 2147 | FLYSNIALYLPDKL | P04133 |
| 45 | 2148 | NSTGNMGVLAGQAS | P04133 |
| 46 | 2149 | YLKYNHADAEFQER | P03135 |
| 47 | 2150 | LAPKGAPNPCEWDE | P04133 |
| 48 | 2151 | IQYTNNYNDPQFVD | Q9YIJ1 |
| 49 | 2152 | SHGKTAKSNIVSQV | P11818 |
| 50 | 2153 | VSAAPVAAALGSPF | P12538 |
| 51 | 2154 | GNDRLLTPNEFEIK | P04133 |
| 52 | 2155 | LEINLEEEDDDNED | P04133 |
| 53 | 2156 | YLRYNHADAEFQER | Q8JQF8 |
| 54 | 2157 | AAGGAAVEGGQGAD | 041855 |
| 55 | 2158 | VKEVTTSNGETTVA | 041855 |
| 56 | 2159 | EAMLRNDTNDQSFN | P04133 |
| 57 | 2160 | DGHFHPSPLIGGFG | 041855 |
| 58 | 2161 | NMTKDWFLVQMLAN | P04133 |
| 59 | 2162 | VGSGTVAAGGGAPM | Q8JQG0 |
| 60 | 2163 | EQYGTVANNLQSSN | 056139 |
| 61 | 2164 | CLEYFPSKMLRTGN | Q9YIJ1 |
| 62 | 2165 | AHALDMTFEVDPMD | P04133 |
| 63 | 2166 | TMANQAKNWLPGPC | Q8JQF8 |
| 64 | 2167 | KRPVEQSPQEPDSS | Q6JC40 |
| 65 | 2168 | KTANDNNNSNFPWT | 056139 |
| 66 | 2169 | TQNNNSEFAWPGAS | Q6JC40 |
| 67 | 2170 | KNTPVPADPPTAFN | Q6JC40 |
| 68 | 2171 | TVQVFSDSEYQLPY | Q9WBP8 |
| 69 | 2172 | LDKGEPVNAADAAA | Q6JC40 |
| 70 | 2173 | VLEPLGLVEEPVKT | P03135 |
| 71 | 2174 | KLFNIQVKEVTTND | Q9WBP8 |
| 72 | 2175 | LQSSNTAPTTRTVN | 056139 |
| 73 | 2176 | SPPLKKTKSNINLE | P11818 |
| 74 | 2177 | LDKGEPVNEADAAA | P03135 |
| 75 | 2178 | MLRTGNNFQFSYEF | Q6JC40 |
| 76 | 2179 | ARKRLNFGQTGDAD | P03135 |
| 77 | 2180 | NTYNGFSTPWGYFD | 041855 |
| 78 | 2181 | QYGTVANNLQSSNT | 056139 |
| 79 | 2182 | LARPPAPTITTVSE | P12538 |
| 80 | 2183 | FPADVFMIPQYGYL | Q6JC40 |
| 81 | 2184 | STGQVSVEIEWELQ | P03135 |
| 82 | 2185 | LRNDTNDQSFNDYL | P04133 |
| 83 | 2186 | NFQFSYEFENVPFH | Q6JC40 |
| 84 | 2187 | FITQYSTGQVTVEM | Q9YIJ1 |
| 85 | 2188 | QQPARKRLNFGQTG | P03135 |
| 86 | 2189 | HDSKLSIATQGPLT | P11818 |
| 87 | 2190 | NTYFGYSTPWGYFD | Q8JQF8 |
| 88 | * | ANNLTSTVQIFADS | 041855 |
| 89 | * | GNTSQQQTDRNAFY | 041855 |
| 90 | * | DTNGVYSEPRPIGT | P03135 |
| 91 | * | KIFNIQVKEVTTSN | 041855 |
| 92 | * | LIKNTPVPADPPTT | Q8JQF8 |
| 93 | * | DEEEIRTTNPVATE | P03135 |
| 94 | * | DKAYDRQLDSGDNP | P03135 |
| 95 | * | DKDKFFPMSGVMIF | 056137 |
| 96 | * | LQQQNTAPQIGTVN | Q8JQF8 |
| 97 | * | GTNTMATGSGAPMA | P03135 |
| 98 | * | IFNIQVKEVTTSNG | 041855 |
| 99 | * | DKAYDQQLQAGDNP | Q8JQF8 |
| 100 | * | DSQWLGDRVITTST | Q6JC40 |
| 101 | * | DEEEIKATNPVATE | Q9WBP8 |
| 102 | * | SFITQYSTGQVSVE | P03135 |
| 103 | * | PLVDQYLYRFVSTN | Q9YIJ1 |
| 104 | * | GKKRPVDQSPQEPD | 056139 |
| 105 | * | NPVATEQYGSVSTN | P03135 |
| 106 | * | DKAYDQQLKAGDNP | Q6JC40 |
| 107 | * | TAPGKKRPVDQSPQ | 056139 |
| 108 | * | VMITDEEEIRTTNP | P03135 |
| 109 | * | FGKQGSEKTNVDIE | P03135 |
| 110 | * | LQRGNRQAATADVN | P03135 |
| 111 | * | KTAPGKKRPVDQSP | 056139 |
| 112 | * | SESVPDPQPIGEPP | AAO88201.1 |
| 113 | * | LEDNLSEGIREWWD | Q9WBP8 |
| 114 | * | PEIQYTSNYNKSVN | P03135 |
| 115 | * | DKFFPMSGVMIFGK | Q9WBP8 |
| 116 | * | APGKKRPVDQSPQE | 056139 |
| 117 | * | NNFQFSYTFEDVPF | 056139 |
| 118 | * | EFAWPGASSWALNG | Q6JC40 |
| 119 | * | QSSNTAPTTRTVND | 056139 |
| 120 | * | PVPADPPTTFNQSK | Q8JQF8 |
| 121 | * | TQYSTGQVSVEIEW | P03135 |
| 122 | * | SKTANDNNNSNFPW | 056139 |
| 123 | * | TVQIFADSSYELPY | 041855 |
| 124 | * | SESVPDPQPLGEPP | Q8JQF8 |
| 125 | * | TESVPDPQPIGEPP | Q6JC40 |
| 126 | * | KNTPVPADPPTTFS | AAO88201.1 |
| 127 | * | PVPADPPTAFNKDK | Q6JC40 |
| 128 | * | KKRPVDQSPQEPDS | 056139 |
| 129 | * | KNTPVPADPPTTFN | Q8JQF8 |
| 130 | * | PRDWQRLINNNWGF | P03135 |
| 131 | * | LFNIQVKEVTTNDG | Q9WBP8 |
| 132 | * | TTSGTTNQSRLLFS | 056139 |
| 133 | * | LSKTANDNNNSNFP | 056139 |
| 134 | * | ENSKRWNPEIQYTS | P03135 |
| 135 | * | DIYYQGPIWAKIPH | 041855 |
| 136 | * | DDEDKFFPMSGVMI | Q9WBP8 |
| 137 | * | THSTLDGRWSALTP | 041855 |
| 138 | * | GADGVGNSSGNWHC | P03135 |
| 139 | * | TIANNLTSTIQVFT | Q8JQF8 |
| 140 | * | PQILIKNTPVPADP | Q6JC40 |
| 141 | * | QLKAGDNPYLRYNH | Q9WBP8 |
| 142 | * | NYNKSVNVDFTVDT | P03135 |
| 143 | * | EEEIKTTNPVATEE | Q8JQF8 |
| 144 | * | KGEPVNEADAAALE | P03135 |
| 145 | * | KGEPVNAADAAALE | Q6JC40 |
| 146 | * | DGHFHPSPLMGGFG | P03135 |
| 147 | * | HYFGYSTPWGYFDF | P03135 |
| 148 | * | EEIKTTNPVATEQY | AAO88201.1 |
| 149 | * | FNIQVKEVTTNDGV | Q9WBP8 |
| 150 | * | PWGYFDFNRFHCHF | P03135 |
| 151 | * | LQQQNAAPIVGAVN | AAO88201.1 |
| 152 | * | DWLEDNLSEGIREW | Q6JC40 |
| 153 | * | WLEDNLSEGIREWW | Q6JC40 |
| 154 | * | DSESVPDPQPIGEP | AAO88201.1 |
| 155 | * | KRPVDQSPQEPDSS | 056139 |
| 156 | * | HSQSLDRLMNPLID | P03135 |
| 157 | * | FEKVPFHSMYAHSQ | 041855 |
| 158 | * | YDQQLKAGDNPYLK | Q6JC40 |
| 159 | * | EDNLSEGIREWWDL | Q9WBP8 |
| 160 | * | QVKEVTTNDGVTTI | Q9WBP8 |
| 161 | * | PQYGYLTLNNGSQA | P03135 |
| 162 | * | EEEIKTTNPVATES | Q6JC40 |
| 163 | * | EGADGVGNASGNWH | Q9WBP8 |
| 164 | * | DSESVPDPQPLGEP | Q8JQF8 |

### NON-PATENT REFERENCES

[0438] Balakrishnan, Balaji, and Ernest David. “Biopolymers augment viral vectors based gene delivery.” Journal of biosciences 44.4 (2019): 1-8.

[0439] Bennett, Antonette, et al. “Structure comparison of the chimeric AAV2. 7m8 vector with parental AAV2.” Journal of structural biology 209.2 (2020): 107433.

[0440] Bertin, Berangere, et al. “Capsid-specific removal of circulating antibodies to adeno-associated virus vectors.” Scientific reports 10.1 (2020): 1-11.

[0441] Börner, Kathleen, et al. “Pre-arrayed pan-AAV peptide display libraries for rapid single-round screening.” Molecular Therapy 28.4 (2020): 1016-1032.

[0442] Carter, John Mark, and Larry Loomis-Price. “B cell epitope mapping using synthetic peptides.” Current protocols in immunology 60.1 (2004): 9-4.

[0443] Cearley, Cassia N., et al. “Expanded repertoire of AAV vector serotypes mediate unique patterns of transduction in mouse brain.” Molecular therapy 16.10 (2008): 1710-1718.

[0444] Colella, Pasqualina, Giuseppe Ronzitti, and Federico Mingozzi. “Emerging issues in AAV-mediated in vivo gene therapy.” Molecular Therapy-Methods & Clinical Development 8 (2018): 87-104.

[0445] Dijkstra, C. D., et al. “The heterogeneity of mononuclear phagocytes in lymphoid organs: distinct macrophage subpopulations in rat recognized by monoclonal antibodies ED1, ED2 and ED3.” Microenvironments in the Lymphoid System. Springer, Boston, MA, 1985. 409-419.

[0446] Domenger, Claire, and Dirk Grimm. “Next-generation AAV vectors-do not judge a virus (only) by its cover.” Human molecular genetics 28.R1 (2019): R3-R14.

[0447] Elliott, Serra E., et al. “A pre-eclampsia-associated Epstein-Barr virus antibody cross-reacts with placental GPR50.” Clinical Immunology 168 (2016): 64-71.

[0448] Erlandsson, Ann, et al. “In vivo clearing of idiotypic antibodies with antiidiotypic antibodies and their derivatives.” Molecular immunology 43.6 (2006): 599-606.

[0449] Etzerodt, Anders, et al. “Efficient intracellular drug-targeting of macrophages using stealth liposomes directed to the hemoglobin scavenger receptor CD163.” Journal of controlled release 160.1 (2012): 72-80.

[0450] Fabriek, Babs O., et al. “The macrophage scavenger receptor CD163 functions as an innate immune sensor for bacteria.” Blood 113.4 (2009): 887-892.

[0451] Fausther-Bovendo, Hugues, and Gary P. Kobinger. “Preexisting immunity against Ad vectors: humoral, cellular, and innate response, what’s important?.” Human vaccines & immunotherapeutics 10.10 (2014): 2875-2884.

[0452] Garces, Jorge Carlos, et al. “Antibody-mediated rejection: a review.” The Ochsner Journal 17.1 (2017): 46.

[0453] Gazarian, Karlen, et al. “Mimotope peptides selected from phage display combinatorial library by serum antibodies of pigs experimentally infected with Taenia solium as leads to developing diagnostic antigens for human neurocysticercosis.” Peptides 38.2 (2012): 381-388.

[0454] Gfeller, David, et al. “Current tools for predicting cancer-specific T cell immunity.” Oncoimmunology 5.7 (2016): e1177691.

[0455] Granfeldt, Asger, et al. “Targeting dexamethasone to macrophages in a porcine endotoxemic model.” Critical Care Medicine 41.11 (2013): e309-e318.

[0456] Graversen, Jonas H., et al. “Targeting the hemoglobin scavenger receptor CD163 in macrophages highly increases the anti-inflammatory potency of dexamethasone.” Molecular Therapy 20.8 (2012): 1550-1558.

[0457] Gurda, Brittney L., et al. “Mapping a neutralizing epitope onto the capsid of adeno-associated virus serotype 8.” Journal of virology 86.15 (2012): 7739-7751.

[0458] Hansen, Lajla Bruntse, Soren Buus, and Claus Schafer-Nielsen. “Identification and mapping of linear antibody epitopes in human serum albumin using high-density peptide arrays.” PLoS One 8.7 (2013): e68902.

[0459] Homma, Masayuki, et al. “A Novel Fusion Protein, AChR-Fc, Ameliorates Myasthenia Gravis by Neutralizing Antiacetylcholine Receptor Antibodies and Suppressing Acetylcholine Receptor-Reactive B Cells.” Neurotherapeutics 14.1 (2017): 191-198.

[0460] Howard Jr, James F. “Myasthenia gravis: the role of complement at the neuromuscular junction.” Annals of the New York Academy of Sciences 1412.1 (2018): 113-128.

[0461] Howarth, M., & Brune, K. D. (2018). New routes and opportunities for modular construction of particulate vaccines: stick, click and glue. Frontiers in immunology, 9, 1432.

[0462] Jansson, Liselotte, et al. “Immunotherapy With Apitopes Blocks the Immune Response to TSH Receptor in HLA-DR Transgenic Mice.” Endocrinology 159.9 (2018): 3446-3457.

[0463] Jensen, Kamilla Kjærgaard, et al. “Improved methods for predicting peptide binding affinity to MHC class II molecules.” Immunology 154.3 (2018): 394-406.

[0464] Jurtz, Vanessa, et al. “NetMHCpan-4.0: improved peptide-MHC class I interaction predictions integrating eluted ligand and peptide binding affinity data.” The Journal of Immunology 199.9 (2017): 3360-3368.

[0465] Kainulainen, Markus H., et al. “High-throughput quantitation of SARS-CoV-2 antibodies in a single-dilution homogeneous assay.” Scientific reports 11.1 (2021): 1-9.

[0466] Koşaloğlu-Yalçin, Zeynep, et al. “Predicting T cell recognition of MHC class I restricted neoepitopes.” Oncoimmunology 7.11 (2018): e1492508.

[0467] Krasnykh, Victor, et al. “Characterization of an adenovirus vector containing a heterologous peptide epitope in the HI loop of the fiber knob.” Journal of virology 72.3 (1998): 1844-1852.

[0468] Kruzik, Anita, et al. “Prevalence of anti-adeno-associated virus immune responses in international cohorts of healthy donors.” Molecular Therapy-Methods & Clinical Development 14 (2019): 126-133.

[0469] Lazaridis, Konstantinos, et al. “Specific removal of autoantibodies by extracorporeal immunoadsorption ameliorates experimental autoimmune myasthenia gravis.” Journal of neuroimmunology 312 (2017): 24-30.

[0470] Leung, Nicki YH, et al. “Screening and identification of mimotopes of the major shrimp allergen tropomyosin using onebead-one-compound peptide libraries.” Cellular & molecular immunology 14.3 (2017): 308-318.

[0471] Li, Chengwen, and R. Jude Samulski. “Engineering adeno-associated virus vectors for gene therapy.” Nature Reviews Genetics 21.4 (2020): 255-272.

[0472] Li, Peipei, Li Wang, and Li-jun Di. “Applications of protein fragment complementation assays for analyzing biomolecular interactions and biochemical networks in living cells.” Journal of proteome research 18.8 (2019): 2987-2998.

[0473] Lim, Sung In, and Inchan Kwon. “Bioconjugation of therapeutic proteins and enzymes using the expanded set of genetically encoded amino acids.” Critical reviews in biotechnology 36.5 (2016): 803-815.

[0474] Lin, Chia-Hao, et al. “Identification of a major epitope by anti-interferon-γ autoantibodies in patients with mycobacterial disease.” Nature medicine 22.9 (2016): 994.

[0475] Lorentz, Kristen M., et al. “Engineered binding to erythrocytes induces immunological tolerance to E. coli asparaginase.” Science advances 1.6 (2015): e1500112.

[0476] Luo, Jie, et al. “Main immunogenic region structure promotes binding of conformation-dependent myasthenia gravis autoantibodies, nicotinic acetylcholine receptor conformation maturation, and agonist sensitivity.” Journal of Neuroscience 29.44 (2009): 13898-13908.

[0477] Luo, Jie, and Jon Lindstrom. “AChR-specific immunosuppressive therapy of myasthenia gravis.” Biochemical pharmacology 97.4 (2015): 609-619.

[0478] Madsen, Mette, et al. “Molecular Characterization of the Haptoglobin· Hemoglobin Receptor CD163 ligand binding properties of the scavenger receptor cysteine-rich domain region.” Journal of Biological Chemistry 279.49 (2004): 51561-51567.

[0479] Majowicz, Anna, et al. “Seroprevalence of pre-existing NABs against AAV1, 2, 5, 6 and 8 in the South African Hemophilia B patient population.” (2019): 3353-3353.

[0480] Manno, Catherine S., et al. “Successful transduction of liver in hemophilia by AAV-Factor IX and limitations imposed by the host immune response.” Nature medicine 12.3 (2006): 342-347.

[0481] Mazor, Ronit, et al. “Tolerogenic nanoparticles restore the antitumor activity of recombinant immunotoxins by mitigating immunogenicity.” Proceedings of the National Academy of Sciences 115.4 (2018): E733-E742.

[0482] Meister, Daniel, S. Maryamdokht Taimoory, and John F. Trant. “Unnatural amino acids improve affinity and modulate immunogenicity: Developing peptides to treat MHC type II autoimmune disorders.” Peptide Science 111.1 (2019): e24058.

[0483] Mietzsch, Mario, et al. “OneBac: platform for scalable and high-titer production of adeno-associated virus serotype 1-12 vectors for gene therapy.” Human gene therapy 25.3 (2014): 212-222.

[0484] Mimuro, Jun, et al. “Minimizing the inhibitory effect of neutralizing antibody for efficient gene expression in the liver with adeno-associated virus 8 vectors.” Molecular Therapy 21.2 (2013): 318-323.

[0485] Mingozzi, Federico, et al. “Overcoming preexisting humoral immunity to AAV using capsid decoys.” Science translational medicine 5.194 (2013): 194ra92-194ra92.

[0486] Mingozzi, Federico, and Katherine A. High. “Overcoming the host immune response to adeno-associated virus gene delivery vectors: the race between clearance, tolerance, neutralization, and escape.” Annual review of virology 4 (2017): 511-534.

[0487] Mok, Darren ZL, and Kuan Rong Chan. “The effects of preexisting antibodies on live-attenuated viral vaccines.” Viruses 12.5 (2020): 520.

[0488] Monahan, Paul E., et al. “Emerging Immunogenicity and Genotoxicity Considerations of Adeno-Associated Virus Vector Gene Therapy for Hemophilia.” Journal of Clinical Medicine 10.11 (2021): 2471.

[0489] Morimoto et. al., Bioconjugate Chemistry 25 (8) (2014): 1479-1491

[0490] Moussa, Ehab M., et al. “Immunogenicity of therapeutic protein aggregates.” Journal of pharmaceutical sciences 105.2 (2016): 417-430.

[0491] Müller, Manuel M. “Post-translational modifications of protein backbones: unique functions, mechanisms, and challenges.” Biochemistry 57.2 (2017): 177-185.

[0492] Siang Ong, Yong, et al. “Recent advances in synthesis and identification of cyclic peptides for bioapplications.” Current topics in medicinal chemistry 17.20 (2017): 2302-2318.

[0493] Peters, Bjoern, et al. “A community resource benchmarking predictions of peptide binding to MHC-I molecules.” PLoS computational biology 2.6 (2006): e65.

[0494] Pishesha, Novalia, et al. “Engineered erythrocytes covalently linked to antigenic peptides can protect against autoimmune disease.” Proceedings of the National Academy of Sciences (2017): 201701746.

[0495] Rey et al., Clinical Immunology 96 (3) (2000): 269-279

[0496] Rice, Peter, Ian Longden, and Alan Bleasby. “EMBOSS: the European molecular biology open software suite.” Trends in genetics 16.6 (2000): 276-277.

[0497] Roberts, Diane M., et al. “Hexon-chimaeric adenovirus serotype 5 vectors circumvent pre-existing anti-vector immunity.” Nature 441.7090 (2006): 239-243.

[0498] Ronzitti, Giuseppe, David-Alexandre Gross, and Federico Mingozzi. “Human immune responses to adeno-associated virus (AAV) vectors.” Frontiers in immunology 11 (2020): 670.

[0499] Ruff, Robert L., and Robert P. Lisak. “Nature and action of antibodies in myasthenia gravis.” Neurologic clinics 36.2 (2018): 275-291.

[0500] Rummler, Silke, et al. “Current techniques for AB0-incompatible living donor liver transplantation.” World journal of transplantation 6.3 (2016): 548.

[0501] Runcie, Karie, et al. “Bi-specific and tri-specific antibodies-the next big thing in solid tumor therapeutics.” Molecular Medicine 24.1 (2018): 50.

[0502] Ryan, Brent J., Ahuva Nissim, and Paul G. Winyard. “Oxidative post-translational modifications and their involvement in the pathogenesis of autoimmune diseases.” Redox biology 2 (2014): 715-724.

[0503] Salganik, Max, Matthew L. Hirsch, and Richard Jude Samulski. “Adeno-associated virus as a mammalian DNA vector.” Mobile DNA III (2015): 827-849.

[0504] Shanmugam, Arulkumaran, et al. “Identification of PSA peptide mimotopes using phage display peptide library.” Peptides 32.6 (2011): 1097-1102.

[0505] Skytthe, Maria K., Jonas Heilskov Graversen, and Søren K. Moestrup. “Targeting of CD163+ Macrophages in Inflammatory and Malignant Diseases.” International Journal of Molecular Sciences 21.15 (2020): 5497.

[0506] Sonntag, F., et al. “The assembly-activating protein promotes capsid assembly of different adeno-associated virus serotypes.” Journal of virology 85.23 (2011): 12686-12697.

[0507] Sørensen, Karen Kristine, et al. “Liver sinusoidal endothelial cells.” Comprehensive Physiology 5.4 (2011): 1751-1774.

[0508] Spiess, Christoph, Qianting Zhai, and Paul J. Carter. “Alternative molecular formats and therapeutic applications for bispecific antibodies.” Molecular immunology 67.2 (2015): 95-106.

[0509] Sunasee, Rajesh, and Ravin Narain. “Covalent and noncovalent bioconjugation strategies.” Chemistry of Bioconjugates: Synthesis, Characterization, and Biomedical Applications (2014): 1-75.

[0510] Taddeo, Adriano, et al. “Selection and depletion of plasma cells based on the specificity of the secreted antibody.” European journal of immunology 45.1 (2015): 317-319.

[0511] Teschner, Sven, et al. “ABO-incompatible kidney transplantation using regenerative selective immunoglobulin adsorption.” Journal of clinical apheresis 27.2 (2012): 51-60.

[0512] Tetala, Kishore KR, et al. “Selective depletion of neuropathy-related antibodies from human serum by monolithic affinity columns containing ganglioside mimics.” Journal of medicinal chemistry 54.10 (2011): 3500-3505.

[0513] Tian, Xingui, et al. “Broadly neutralizing monoclonal antibodies against human adenovirus types 55, 14p, 7, and 11 generated with recombinant type 11 fiber knob.” Emerging microbes & infections 7.1 (2018): 1-12.

[0514] Tseng, Yu-Shan, and Mavis Agbandje-McKenna. “Mapping the AAV capsid host antibody response toward the development of second generation gene delivery vectors.” Frontiers in immunology 5 (2014): 9.

[0515] Varghese, Robin, et al. “Postentry neutralization of adenovirus type 5 by an antihexon antibody.” Journal of virology 78.22 (2004): 12320-12332.

[0516] Verdera, Helena Costa, Klaudia Kuranda, and Federico Mingozzi. “AAV vector immunogenicity in humans: a long journey to successful gene transfer.” Molecular Therapy 28.3 (2020): 723-746.

[0517] Vincent, Angela, et al. “Serological and experimental studies in different forms of myasthenia gravis.” Annals of the New York Academy of Sciences 1413.1 (2018): 143-153.

[0518] Wallukat, Gerd, et al. “Patients with preeclampsia develop agonistic autoantibodies against the angiotensin AT 1 receptor.” The Journal of clinical investigation 103.7 (1999): 945-952.

[0519] Wang, Rong, et al. “A Murine Monoclonal Antibody With Potent Neutralization Ability Against Human Adenovirus 7.” Frontiers in cellular and infection microbiology 9 (2019): 417.

[0520] Zhou, Cissy C., et al. “Angiotensin receptor agonistic autoantibodies induce pre-eclampsia in pregnant mice.” Nature medicine 14.8 (2008): 855.

[0521] Zhu, Feng-Cai, et al. “Safety, tolerability, and immunogenicity of a recombinant adenovirus type-5 vectored COVID-19 vaccine: a dose-escalation, open-label, non-randomised, first-in-human trial.” The Lancet 395.10240 (2020): 1845-1854.

1. A compound comprising;
a biopolymer scaffold and at least
a first peptide n-mer of the general formula:
$$\text{P} {\left(- \text{S} - \text{P}\right)}_{\left(\text{n} - 1\right)} ; \text{and}$$
a second peptide n-mer of the general formula:
$$\text{P} {\left(- \text{S} - \text{P}\right)}_{\left(\text{n} - 1\right)} - ;$$
wherein, independently for each occurrence, P is a peptide with a sequence length of 6-13 amino acids, and S is a non-peptide spacers;
wherein, independently for each of the peptide n-mers, n is an integer of at least 1;
wherein each of the peptide n-mers is bound to the biopolymer scaffold;
wherein, independently for each occurrence, P has an amino-acid sequence comprising a sequence fragment with a length of at least six amino acids of a capsid protein sequence of a viral vector; and
wherein at most three amino acids of the sequence fragment are independently substituted by any other amino acid.

2. The compound of claim 1, wherein the viral vector is an adenovirus (AdV) vector or an adeno-associated virus (AAV) vector.

3. The compound of claim 2, wherein said sequence fragment comprises a sequence of at least 6 consecutive amino acids selected from:
the group of AdV sequences ETGPPTVPFLTPPF (SEQ ID NO: 32), HDSKLSIATQGPL (SEQ ID NO: 33), LNLRLGQGPLFINSAHNLDINY (SEQ ID NO: 34), VDPMDEPTLLYVLFEVFDVV (SEQ ID NO: 35), MKRARPSEDTFNPVYPYD (SEQ ID NO: 36), ISGTVQSAHLIIRFD (SEQ ID NO: 37), LGQGPLFINSAHNLDINYNKGLYLF (SEQ ID NO: 38), SYPFDAQNQLNLRLGQGPLFIN (SEQ ID NO: 39), GDTTPSAYSMSFSWDWSGHNYIN (SEQ ID NO: 40), VLLNNSFLDPEYWNFRN (SEQ ID NO: 41), HNYINEIFATSSYTFSYIA (SEQ ID NO: 42), DEAATALEINLEEEDDDNEDEVDEQAEQQKTH (SEQ ID NO: 43), INLEEEDDDNEDEVDEQAEQ (SEQ ID NO: 44), DNEDEVDEQAEQQKTHVF (SEQ ID NO: 45), EWDEAATALEINLEE (SEQ ID NO: 46), PKVVLYSEDVDIETPDTHISYMP (SEQ ID NO: 47), YIPESYKDRMYSFFRNF (SEQ ID NO: 48), DSIGDRTRYFSMW (SEQ ID NO: 49), SYKDRMYSFFRNF (SEQ ID NO: 50), and FLVQMLANYNIGYQGFY (SEQ ID NO: 51), or
the group of AAV sequences WQNRDVYLQGPIWAKIP (SEQ ID NO: 52), DNTYFGYSTPWGYFDFNRFHC (SEQ ID NO: 53), MANQAKNWLPGPCY (SEQ ID NO: 54), LPYVLGSAHQGCLPPFP (SEQ ID NO: 55), NGSQAVGRSSFYCLEYF (SEQ ID NO: 56), PLIDQYLYYL (SEQ ID NO: 57), EERFFPSNGILIF (SEQ ID NO: 58), ADGVGSSSGNWHC (SEQ ID NO: 59), SEQ ID NOs: 383-1891, SEQ ID NOs: 1892-2063 and SEQ ID NOs: 2064-2103, or
the group of sequences identified by SEQ ID NOs: 2104-2190.

4. The compound of claim 1, wherein at least one occurrence of P is a circularized peptide .

5. The compound of claim 1, wherein, independently for each occurrence, P is Pₐ or P_{b};
wherein Pₐ has an amino-acid sequence comprising a first sequence fragment with a length of at least six amino acids of a capsid protein sequence of a viral vector, wherein at most three amino acids of the sequence fragment are independently substituted by any other amino acid; and
wherein P_{b} has an amino-acid sequence comprising a second sequence fragment with a length of at least six amino acids of a capsid protein sequence of a viral vector, wherein at most three amino acids of the sequence fragment are independently substituted by any other amino acid; and wherein
the first peptide n-mer is Pa - S - Pₐ and the second peptide n-mer is Pₐ - S - Pₐ-,
the first peptide n-mer is Pₐ - S - Pₐ and the second peptide n-mer is P_{b} - S - P_{b}-,
the first peptide n-mer is P_{b} - S - P_{b} and the second peptide n-mer is P_{b} - S - P_{b-},
the first peptide n-mer is Pₐ - S - P_{b} and the second peptide n-mer is Pₐ - S - P_{b-},
the first peptide n-mer is Pₐ - S - P_{b} and the second peptide n-mer is Pₐ - S - Pₐ₋, or
the first peptide n-mer is Pₐ - S - P_{b} and the second peptide n-mer is P_{b} - S - P_{b}.

6. The compound of claim 5, wherein the peptide Pₐ and the peptide P_{b} are two different epitopes of the same capsid antigen or two different epitope parts of the same capsid epitope.

7. The compound of claim 1, wherein the biopolymer scaffold is selected from the group consisting of albumins, alpha1-globulins, alpha2-globulins, beta-globulins and immunoglobulins, wherein the biopolymer scaffold is haptoglobin or transferrin, ; or wherein the biopolymer scaffold is an antibody specific for a CD163 protein, or a CD163-binding fragment thereof.

8. The compound of claim 1, wherein the compound is non-immunogenic in a mammal, in a human, in a non-human primate, in a sheep, in a pig, in a dog or in a rodent.

9. A pharmaceutical composition comprising the compound of claim 1 and at least one pharmaceutically acceptable excipient.

10. The pharmaceutical composition of claim 9, wherein the composition is non-immunogenic in humans.

11. The pharmaceutical composition of claim 9 for use in therapy.

12. The pharmaceutical composition for use according to claim 11, for use in increasing efficacy of a vaccine in an individual, wherein the vaccine comprises the viral vector, wherein the pharmaceutical composition is administered to the individual prior to or concurrently with administration of the vaccine.

13. The pharmaceutical composition for use according to claim 11, for use in increasing efficacy of a gene therapy composition in an individual, wherein the gene therapy composition comprises the viral vector, wherein the pharmaceutical composition is administered to the individual prior to or concurrently with administration of the gene therapy composition.

14. A method of sequestering one or more antibodies present in an individual, comprising:
obtaining a pharmaceutical composition as defined in claim 9, wherein the composition is non-immunogenic in the individual and wherein the one or more antibodies present in the individual are specific for at least one occurrence of P, or for peptide Pₐ and/or peptide P_{b}; and
administering the pharmaceutical composition to the individual.

15. A vaccine or gene therapy composition, comprising the compound of claim 1 and further comprising the viral vector and at least one pharmaceutically acceptable excipient.

16. A method of inhibiting an immune reaction to a treatment with a vaccine or a gene therapy composition in an individual in need of treatment with the vaccine or gene therapy composition, comprising:
obtaining the vaccine or gene therapy composition as defined in claim 15; wherein the compound of the vaccine or gene therapy composition is non-immunogenic in the individual; and
administering the vaccine or gene therapy composition to the individual.

The application's sequence listing, which the Patent Office published only in electronic form, follows.

SEQUENCE LISTING (2190 sequences)

SEQ ID NO: 1 - protein, 116 aa, Artificial Sequence
  heavy chain variable (VH) region
DVQLQESGPGLVKPSQSLSLTCTVTGYSITSDYAWNWIRQFPGNKLEWMGYITYSGITNYNPSLKSQISITRDTSKNQFFLQLNSVTTEDTATYYCVSGTYYFDYWGQGTTLTVSS

SEQ ID NO: 2 - protein, 109 aa, Artificial Sequence
  light chain variable (VL) region
SVVMTQTPKSLLISIGDRVTITCKASQSVSSDVAWFQQKPGQSPKPLIYYASNRYTGVPDRFTGSGYGTDFTFTISSVQAEDLAVYFCGQDYTSPRTFGGGTKLEIKRA

SEQ ID NO: 3 - protein, 25 aa, Artificial Sequence
  peptide
CSGRVEVKVQEEWGTVCNNGWSMEA

SEQ ID NO: 4 - protein, 11 aa, Artificial Sequence
  peptide
GRVEVKVQEEW

SEQ ID NO: 5 - protein, 10 aa, Artificial Sequence
  peptide
WGTVCNNGWS

SEQ ID NO: 6 - protein, 9 aa, Artificial Sequence
  peptide
WGTVCNNGW

SEQ ID NO: 7 - protein, 13 aa, Artificial Sequence
  peptide
EWGTVCNNGWSME

SEQ ID NO: 8 - protein, 13 aa, Artificial Sequence
  peptide
QEEWGTVCNNGWS

SEQ ID NO: 9 - protein, 13 aa, Artificial Sequence
  peptide
WGTVCNNGWSMEA

SEQ ID NO: 10 - protein, 13 aa, Artificial Sequence
  peptide
EEWGTVCNNGWSM

SEQ ID NO: 11 - protein, 13 aa, Artificial Sequence
  peptide
VQEEWGTVCNNGW

SEQ ID NO: 12 - protein, 10 aa, Artificial Sequence
  peptide
EWGTVCNNGW

SEQ ID NO: 13 - protein, 21 aa, Artificial Sequence
  peptide
DHVSCRGNESALWDCKHDGWG

SEQ ID NO: 14 - protein, 5 aa, Artificial Sequence
  peptide
ESALW

SEQ ID NO: 15 - protein, 7 aa, Artificial Sequence
  peptide
ESALWDC

SEQ ID NO: 16 - protein, 10 aa, Artificial Sequence
  peptide
RGNESALWDC

SEQ ID NO: 17 - protein, 10 aa, Artificial Sequence
  peptide
SCRGNESALW

SEQ ID NO: 18 - protein, 13 aa, Artificial Sequence
  peptide
VSCRGNESALWDC

SEQ ID NO: 19 - protein, 10 aa, Artificial Sequence
  peptide
ALWDCKHDGW

SEQ ID NO: 20 - protein, 13 aa, Artificial Sequence
  peptide
DHVSCRGNESALW

SEQ ID NO: 21 - protein, 10 aa, Artificial Sequence
  peptide
CRGNESALWD

SEQ ID NO: 22 - protein, 13 aa, Artificial Sequence
  peptide
NESALWDCKHDGW

SEQ ID NO: 23 - protein, 13 aa, Artificial Sequence
  peptide
ESALWDCKHDGWG

SEQ ID NO: 24 - protein, 20 aa, Artificial Sequence
  peptide
SSLGGTDKELRLVDGENKCS

SEQ ID NO: 25 - protein, 11 aa, Artificial Sequence
  peptide
SSLGGTDKELR

SEQ ID NO: 26 - protein, 5 aa, Artificial Sequence
  peptide
SSLGG

SEQ ID NO: 27 - protein, 10 aa, Artificial Sequence
  peptide
SSLGGTDKEL

SEQ ID NO: 28 - protein, 9 aa, Artificial Sequence
  peptide
SSLGGTDKE

SEQ ID NO: 29 - protein, 8 aa, Artificial Sequence
  peptide
SSLGGTDK

SEQ ID NO: 30 - protein, 7 aa, Artificial Sequence
  peptide
SSLGGTD

SEQ ID NO: 31 - protein, 6 aa, Artificial Sequence
  peptide
SSLGGT

SEQ ID NO: 32 - protein, 14 aa, Artificial Sequence
  peptide
ETGPPTVPFLTPPF

SEQ ID NO: 33 - protein, 13 aa, Artificial Sequence
  peptide
HDSKLSIATQGPL

SEQ ID NO: 34 - protein, 22 aa, Artificial Sequence
  peptide
LNLRLGQGPLFINSAHNLDINY

SEQ ID NO: 35 - protein, 20 aa, Artificial Sequence
  peptide
VDPMDEPTLLYVLFEVFDVV

SEQ ID NO: 36 - protein, 18 aa, Artificial Sequence
  peptide
MKRARPSEDTFNPVYPYD

SEQ ID NO: 37 - protein, 15 aa, Artificial Sequence
  peptide
ISGTVQSAHLIIRFD

SEQ ID NO: 38 - protein, 25 aa, Artificial Sequence
  peptide
LGQGPLFINSAHNLDINYNKGLYLF

SEQ ID NO: 39 - protein, 22 aa, Artificial Sequence
  peptide
SYPFDAQNQLNLRLGQGPLFIN

SEQ ID NO: 40 - protein, 23 aa, Artificial Sequence
  peptide
GDTTPSAYSMSFSWDWSGHNYIN

SEQ ID NO: 41 - protein, 17 aa, Artificial Sequence
  peptide
VLLNNSFLDPEYWNFRN

SEQ ID NO: 42 - protein, 19 aa, Artificial Sequence
  peptide
HNYINEIFATSSYTFSYIA

SEQ ID NO: 43 - protein, 32 aa, Artificial Sequence
  peptide
DEAATALEINLEEEDDDNEDEVDEQAEQQKTH

SEQ ID NO: 44 - protein, 20 aa, Artificial Sequence
  peptide
INLEEEDDDNEDEVDEQAEQ

SEQ ID NO: 45 - protein, 18 aa, Artificial Sequence
  peptide
DNEDEVDEQAEQQKTHVF

SEQ ID NO: 46 - protein, 15 aa, Artificial Sequence
  peptide
EWDEAATALEINLEE

SEQ ID NO: 47 - protein, 23 aa, Artificial Sequence
  peptide
PKVVLYSEDVDIETPDTHISYMP

SEQ ID NO: 48 - protein, 17 aa, Artificial Sequence
  peptide
YIPESYKDRMYSFFRNF

SEQ ID NO: 49 - protein, 13 aa, Artificial Sequence
  peptide
DSIGDRTRYFSMW

SEQ ID NO: 50 - protein, 13 aa, Artificial Sequence
  peptide
SYKDRMYSFFRNF

SEQ ID NO: 51 - protein, 17 aa, Artificial Sequence
  peptide
FLVQMLANYNIGYQGFY

SEQ ID NO: 52 - protein, 17 aa, Artificial Sequence
  peptide
WQNRDVYLQGPIWAKIP

SEQ ID NO: 53 - protein, 21 aa, Artificial Sequence
  peptide
DNTYFGYSTPWGYFDFNRFHC

SEQ ID NO: 54 - protein, 14 aa, Artificial Sequence
  peptide
MANQAKNWLPGPCY

SEQ ID NO: 55 - protein, 17 aa, Artificial Sequence
  peptide
LPYVLGSAHQGCLPPFP

SEQ ID NO: 56 - protein, 17 aa, Artificial Sequence
  peptide
NGSQAVGRSSFYCLEYF

SEQ ID NO: 57 - protein, 10 aa, Artificial Sequence
  peptide
PLIDQYLYYL

SEQ ID NO: 58 - protein, 13 aa, Artificial Sequence
  peptide
EERFFPSNGILIF

SEQ ID NO: 59 - protein, 13 aa, Artificial Sequence
  peptide
ADGVGSSSGNWHC

SEQ ID NO: 60 - protein, 10 aa, Artificial Sequence
  peptide
GPPTVPFLTP

SEQ ID NO: 61 - protein, 13 aa, Artificial Sequence
  peptide
ETGPPTVPFLTPP

SEQ ID NO: 62 - protein, 10 aa, Artificial Sequence
  peptide
TGPPTVPFLT

SEQ ID NO: 63 - protein, 10 aa, Artificial Sequence
  peptide
PTVPFLTPPF

SEQ ID NO: 64 - protein, 13 aa, Artificial Sequence
  peptide
HDSKLSIATQGPL

SEQ ID NO: 65 - protein, 7 aa, Artificial Sequence
  peptide
SIATQGP

SEQ ID NO: 66 - protein, 10 aa, Artificial Sequence
  peptide
NLRLGQGPLF

SEQ ID NO: 67 - protein, 10 aa, Artificial Sequence
  peptide
QGPLFINSAH

SEQ ID NO: 68 - protein, 11 aa, Artificial Sequence
  peptide
PLFINSAHNLD

SEQ ID NO: 69 - protein, 7 aa, Artificial Sequence
  peptide
LGQGPLF

SEQ ID NO: 70 - protein, 10 aa, Artificial Sequence
  peptide
LNLRLGQGPL

SEQ ID NO: 71 - protein, 7 aa, Artificial Sequence
  peptide
GQGPLFI

SEQ ID NO: 72 - protein, 13 aa, Artificial Sequence
  peptide
NLRLGQGPLFINS

SEQ ID NO: 73 - protein, 13 aa, Artificial Sequence
  peptide
LFINSAHNLDINY

SEQ ID NO: 74 - protein, 10 aa, Artificial Sequence
  peptide
FINSAHNLDI

SEQ ID NO: 75 - protein, 10 aa, Artificial Sequence
  peptide
LRLGQGPLFI

SEQ ID NO: 76 - protein, 10 aa, Artificial Sequence
  peptide
GPLFINSAHN

SEQ ID NO: 77 - protein, 13 aa, Artificial Sequence
  peptide
DEPTLLYVLFEVF

SEQ ID NO: 78 - protein, 10 aa, Artificial Sequence
  peptide
TLLYVLFEVF

SEQ ID NO: 79 - protein, 10 aa, Artificial Sequence
  peptide
DEPTLLYVLF

SEQ ID NO: 80 - protein, 13 aa, Artificial Sequence
  peptide
TLLYVLFEVFDVV

SEQ ID NO: 81 - protein, 7 aa, Artificial Sequence
  peptide
TLLYVLF

SEQ ID NO: 82 - protein, 13 aa, Artificial Sequence
  peptide
MDEPTLLYVLFEV

SEQ ID NO: 83 - protein, 10 aa, Artificial Sequence
  peptide
EPTLLYVLFE

SEQ ID NO: 84 - protein, 13 aa, Artificial Sequence
  peptide
DPMDEPTLLYVLF

SEQ ID NO: 85 - protein, 10 aa, Artificial Sequence
  peptide
LLYVLFEVFD

SEQ ID NO: 86 - protein, 10 aa, Artificial Sequence
  peptide
YVLFEVFDVV

SEQ ID NO: 87 - protein, 10 aa, Artificial Sequence
  peptide
PTLLYVLFEV

SEQ ID NO: 88 - protein, 13 aa, Artificial Sequence
  peptide
PTLLYVLFEVFDV

SEQ ID NO: 89 - protein, 10 aa, Artificial Sequence
  peptide
LYVLFEVFDV

SEQ ID NO: 90 - protein, 13 aa, Artificial Sequence
  peptide
EPTLLYVLFEVFD

SEQ ID NO: 91 - protein, 7 aa, Artificial Sequence
  peptide
LYVLFEV

SEQ ID NO: 92 - protein, 13 aa, Artificial Sequence
  peptide
PMDEPTLLYVLFE

SEQ ID NO: 93 - protein, 7 aa, Artificial Sequence
  peptide
LLYVLFE

SEQ ID NO: 94 - protein, 13 aa, Artificial Sequence
  peptide
VDPMDEPTLLYVL

SEQ ID NO: 95 - protein, 7 aa, Artificial Sequence
  peptide
YVLFEVF

SEQ ID NO: 96 - protein, 7 aa, Artificial Sequence
  peptide
PTLLYVL

SEQ ID NO: 97 - protein, 11 aa, Artificial Sequence
  peptide
MKRARPSEDTF

SEQ ID NO: 98 - protein, 10 aa, Artificial Sequence
  peptide
KRARPSEDTF

SEQ ID NO: 99 - protein, 10 aa, Artificial Sequence
  peptide
MKRARPSEDT

SEQ ID NO: 100 - protein, 12 aa, Artificial Sequence
  peptide
MKRARPSEDTFN

SEQ ID NO: 101 - protein, 10 aa, Artificial Sequence
  peptide
ARPSEDTFNP

SEQ ID NO: 102 - protein, 10 aa, Artificial Sequence
  peptide
RARPSEDTFN

SEQ ID NO: 103 - protein, 7 aa, Artificial Sequence
  peptide
RPSEDTF

SEQ ID NO: 104 - protein, 13 aa, Artificial Sequence
  peptide
MKRARPSEDTFNP

SEQ ID NO: 105 - protein, 13 aa, Artificial Sequence
  peptide
RARPSEDTFNPVY

SEQ ID NO: 106 - protein, 7 aa, Artificial Sequence
  peptide
ARPSEDT

SEQ ID NO: 107 - protein, 10 aa, Artificial Sequence
  peptide
EDTFNPVYPY

SEQ ID NO: 108 - protein, 13 aa, Artificial Sequence
  peptide
RPSEDTFNPVYPY

SEQ ID NO: 109 - protein, 13 aa, Artificial Sequence
  peptide
KRARPSEDTFNPV

SEQ ID NO: 110 - protein, 7 aa, Artificial Sequence
  peptide
DTFNPVY

SEQ ID NO: 111 - protein, 10 aa, Artificial Sequence
  peptide
RPSEDTFNPV

SEQ ID NO: 112 - protein, 10 aa, Artificial Sequence
  peptide
PSEDTFNPVY

SEQ ID NO: 113 - protein, 10 aa, Artificial Sequence
  peptide
DTFNPVYPYD

SEQ ID NO: 114 - protein, 10 aa, Artificial Sequence
  peptide
VQSAHLIIRF

SEQ ID NO: 115 - protein, 7 aa, Artificial Sequence
  peptide
AHLIIRF

SEQ ID NO: 116 - protein, 13 aa, Artificial Sequence
  peptide
SGTVQSAHLIIRF

SEQ ID NO: 117 - protein, 10 aa, Artificial Sequence
  peptide
TVQSAHLIIR

SEQ ID NO: 118 - protein, 7 aa, Artificial Sequence
  peptide
HLIIRFD

SEQ ID NO: 119 - protein, 7 aa, Artificial Sequence
  peptide
SAHLIIR

SEQ ID NO: 120 - protein, 10 aa, Artificial Sequence
  peptide
QSAHLIIRFD

SEQ ID NO: 121 - protein, 13 aa, Artificial Sequence
  peptide
ISGTVQSAHLIIR

SEQ ID NO: 122 - protein, 10 aa, Artificial Sequence
  peptide
GTVQSAHLII

SEQ ID NO: 123 - protein, 13 aa, Artificial Sequence
  peptide
GTVQSAHLIIRFD

SEQ ID NO: 124 - protein, 7 aa, Artificial Sequence
  peptide
QSAHLII

SEQ ID NO: 125 - protein, 7 aa, Artificial Sequence
  peptide
HNLDINY

SEQ ID NO: 126 - protein, 13 aa, Artificial Sequence
  peptide
LFINSAHNLDINY

SEQ ID NO: 127 - protein, 13 aa, Artificial Sequence
  peptide
NLDINYNKGLYLF

SEQ ID NO: 128 - protein, 6 aa, Artificial Sequence
  peptide
FVSPNG

SEQ ID NO: 129 - protein, 7 aa, Artificial Sequence
  peptide
NYINEIF

SEQ ID NO: 130 - protein, 7 aa, Artificial Sequence
  peptide
NKGLYLF

SEQ ID NO: 131 - protein, 10 aa, Artificial Sequence
  peptide
INYNKGLYLF

SEQ ID NO: 132 - protein, 10 aa, Artificial Sequence
  peptide
NSAHNLDINY

SEQ ID NO: 133 - protein, 13 aa, Artificial Sequence
  peptide
WDWSGHNYINEIF

SEQ ID NO: 134 - protein, 10 aa, Artificial Sequence
  peptide
SGHNYINEIF

SEQ ID NO: 135 - protein, 7 aa, Artificial Sequence
  peptide
LGTGLSF

SEQ ID NO: 136 - protein, 7 aa, Artificial Sequence
  peptide
PFLTPPF

SEQ ID NO: 137 - protein, 7 aa, Artificial Sequence
  peptide
LGQGPLF

SEQ ID NO: 138 - protein, 10 aa, Artificial Sequence
  peptide
NLRLGQGPLF

SEQ ID NO: 139 - protein, 13 aa, Artificial Sequence
  peptide
NQLNLRLGQGPLF

SEQ ID NO: 140 - protein, 7 aa, Artificial Sequence
  peptide
GQGPLFI

SEQ ID NO: 141 - protein, 13 aa, Artificial Sequence
  peptide
QLNLRLGQGPLFI

SEQ ID NO: 142 - protein, 13 aa, Artificial Sequence
  peptide
SYPFDAQNQLNLR

SEQ ID NO: 143 - protein, 13 aa, Artificial Sequence
  peptide
YPFDAQNQLNLRL

SEQ ID NO: 144 - protein, 10 aa, Artificial Sequence
  peptide
LRLGQGPLFI

SEQ ID NO: 145 - protein, 7 aa, Artificial Sequence
  peptide
NQLNLRL

SEQ ID NO: 146 - protein, 10 aa, Artificial Sequence
  peptide
FDAQNQLNLR

SEQ ID NO: 147 - protein, 7 aa, Artificial Sequence
  peptide
QNQLNLR

SEQ ID NO: 148 - protein, 7 aa, Artificial Sequence
  peptide
QGPLFIN

SEQ ID NO: 149 - protein, 13 aa, Artificial Sequence
  peptide
PFDAQNQLNLRLG

SEQ ID NO: 150 - protein, 10 aa, Artificial Sequence
  peptide
DAQNQLNLRL

SEQ ID NO: 151 - protein, 10 aa, Artificial Sequence
  peptide
RLGQGPLFIN

SEQ ID NO: 152 - protein, 7 aa, Artificial Sequence
  peptide
QLNLRLG

SEQ ID NO: 153 - protein, 13 aa, Artificial Sequence
  peptide
FDAQNQLNLRLGQ

SEQ ID NO: 154 - protein, 13 aa, Artificial Sequence
  peptide
LNLRLGQGPLFIN

SEQ ID NO: 155 - protein, 10 aa, Artificial Sequence
  peptide
AQNQLNLRLG

SEQ ID NO: 156 - protein, 7 aa, Artificial Sequence
  peptide
AQNQLNL

SEQ ID NO: 157 - protein, 7 aa, Artificial Sequence
  peptide
LNLRLGQ

SEQ ID NO: 158 - protein, 10 aa, Artificial Sequence
  peptide
SYPFDAQNQL

SEQ ID NO: 159 - protein, 10 aa, Artificial Sequence
  peptide
PFDAQNQLNL

SEQ ID NO: 160 - protein, 7 aa, Artificial Sequence
  peptide
YSMSFSW

SEQ ID NO: 161 - protein, 13 aa, Artificial Sequence
  peptide
TPSAYSMSFSWDW

SEQ ID NO: 162 - protein, 7 aa, Artificial Sequence
  peptide
MSFSWDW

SEQ ID NO: 163 - protein, 10 aa, Artificial Sequence
  peptide
PSAYSMSFSW

SEQ ID NO: 164 - protein, 13 aa, Artificial Sequence
  peptide
DTTPSAYSMSFSW

SEQ ID NO: 165 - protein, 10 aa, Artificial Sequence
  peptide
TTPSAYSMSF

SEQ ID NO: 166 - protein, 10 aa, Artificial Sequence
  peptide
YSMSFSWDWS

SEQ ID NO: 167 - protein, 13 aa, Artificial Sequence
  peptide
TGDTTPSAYSMSF

SEQ ID NO: 168 - protein, 10 aa, Artificial Sequence
  peptide
FSWDWSGHNY

SEQ ID NO: 169 - protein, 7 aa, Artificial Sequence
  peptide
SFSWDWS

SEQ ID NO: 170 - protein, 7 aa, Artificial Sequence
  peptide
SAYSMSF

SEQ ID NO: 171 - protein, 10 aa, Artificial Sequence
  peptide
SFSWDWSGHN

SEQ ID NO: 172 - protein, 10 aa, Artificial Sequence
  peptide
SAYSMSFSWD

SEQ ID NO: 173 - protein, 7 aa, Artificial Sequence
  peptide
SMSFSWD

SEQ ID NO: 174 - protein, 10 aa, Artificial Sequence
  peptide
SWDWSGHNYI

SEQ ID NO: 175 - protein, 7 aa, Artificial Sequence
  peptide
AYSMSFS

SEQ ID NO: 176 - protein, 13 aa, Artificial Sequence
  peptide
SMSFSWDWSGHNY

SEQ ID NO: 177 - protein, 7 aa, Artificial Sequence
  peptide
FSWDWSG

SEQ ID NO: 178 - protein, 7 aa, Artificial Sequence
  peptide
SWDWSGH

SEQ ID NO: 179 - protein, 10 aa, Artificial Sequence
  peptide
FLDPEYWNFR

SEQ ID NO: 180 - protein, 10 aa, Artificial Sequence
  peptide
SFLDPEYWNF

SEQ ID NO: 181 - protein, 7 aa, Artificial Sequence
  peptide
PEYWNFR

SEQ ID NO: 182 - protein, 13 aa, Artificial Sequence
  peptide
LNNSFLDPEYWNF

SEQ ID NO: 183 - protein, 13 aa, Artificial Sequence
  peptide
NNSFLDPEYWNFR

SEQ ID NO: 184 - protein, 7 aa, Artificial Sequence
  peptide
FLDPEYW

SEQ ID NO: 185 - protein, 7 aa, Artificial Sequence
  peptide
DPEYWNF

SEQ ID NO: 186 - protein, 10 aa, Artificial Sequence
  peptide
NNSFLDPEYW

SEQ ID NO: 187 - protein, 13 aa, Artificial Sequence
  peptide
VLLNNSFLDPEYW

SEQ ID NO: 188 - protein, 7 aa, Artificial Sequence
  peptide
EYWNFRN

SEQ ID NO: 189 - protein, 10 aa, Artificial Sequence
  peptide
LNNSFLDPEY

SEQ ID NO: 190 - protein, 10 aa, Artificial Sequence
  peptide
LDPEYWNFRN

SEQ ID NO: 191 - protein, 7 aa, Artificial Sequence
  peptide
LNNSFLD

SEQ ID NO: 192 - protein, 10 aa, Artificial Sequence
  peptide
NSFLDPEYWN

SEQ ID NO: 193 - protein, 7 aa, Artificial Sequence
  peptide
SSYTFSY

SEQ ID NO: 194 - protein, 10 aa, Artificial Sequence
  peptide
FATSSYTFSY

SEQ ID NO: 195 - protein, 13 aa, Artificial Sequence
  peptide
YINEIFATSSYTF

SEQ ID NO: 196 - protein, 7 aa, Artificial Sequence
  peptide
SYTFSYI

SEQ ID NO: 197 - protein, 7 aa, Artificial Sequence
  peptide
ATSSYTF

SEQ ID NO: 198 - protein, 10 aa, Artificial Sequence
  peptide
EIFATSSYTF

SEQ ID NO: 199 - protein, 13 aa, Artificial Sequence
  peptide
NEIFATSSYTFSY

SEQ ID NO: 200 - protein, 10 aa, Artificial Sequence
  peptide
ATSSYTFSYI

SEQ ID NO: 201 - protein, 13 aa, Artificial Sequence
  peptide
HNYINEIFATSSY

SEQ ID NO: 202 - protein, 7 aa, Artificial Sequence
  peptide
IFATSSY

SEQ ID NO: 203 - protein, 10 aa, Artificial Sequence
  peptide
INEIFATSSY

SEQ ID NO: 204 - protein, 13 aa, Artificial Sequence
  peptide
NYINEIFATSSYT

SEQ ID NO: 205 - protein, 7 aa, Artificial Sequence
  peptide
YINEIFA

SEQ ID NO: 206 - protein, 7 aa, Artificial Sequence
  peptide
YTFSYIA

SEQ ID NO: 207 - protein, 13 aa, Artificial Sequence
  peptide
EIFATSSYTFSYI

SEQ ID NO: 208 - protein, 13 aa, Artificial Sequence
  peptide
ALEINLEEEDDDN

SEQ ID NO: 209 - protein, 13 aa, Artificial Sequence
  peptide
ATALEINLEEEDD

SEQ ID NO: 210 - protein, 13 aa, Artificial Sequence
  peptide
EAATALEINLEEE

SEQ ID NO: 211 - protein, 7 aa, Artificial Sequence
  peptide
LEINLEE

SEQ ID NO: 212 - protein, 13 aa, Artificial Sequence
  peptide
TALEINLEEEDDD

SEQ ID NO: 213 - protein, 7 aa, Artificial Sequence
  peptide
EINLEEE

SEQ ID NO: 214 - protein, 10 aa, Artificial Sequence
  peptide
ALEINLEEED

SEQ ID NO: 215 - protein, 10 aa, Artificial Sequence
  peptide
LEINLEEEDD

SEQ ID NO: 216 - protein, 10 aa, Artificial Sequence
  peptide
TALEINLEEE

SEQ ID NO: 217 - protein, 13 aa, Artificial Sequence
  peptide
DEAATALEINLEE

SEQ ID NO: 218 - protein, 13 aa, Artificial Sequence
  peptide
LEINLEEEDDDNE

SEQ ID NO: 219 - protein, 13 aa, Artificial Sequence
  peptide
AATALEINLEEED

SEQ ID NO: 220 - protein, 10 aa, Artificial Sequence
  peptide
EINLEEEDDD

SEQ ID NO: 221 - protein, 10 aa, Artificial Sequence
  peptide
ATALEINLEE

SEQ ID NO: 222 - protein, 10 aa, Artificial Sequence
  peptide
INLEEEDDDN

SEQ ID NO: 223 - protein, 10 aa, Artificial Sequence
  peptide
NLEEEDDDNE

SEQ ID NO: 224 - protein, 7 aa, Artificial Sequence
  peptide
DEVDEQA

SEQ ID NO: 225 - protein, 13 aa, Artificial Sequence
  peptide
EDDDNEDEVDEQA

SEQ ID NO: 226 - protein, 13 aa, Artificial Sequence
  peptide
DDNEDEVDEQAEQ

SEQ ID NO: 227 - protein, 7 aa, Artificial Sequence
  peptide
EVDEQAE

SEQ ID NO: 228 - protein, 10 aa, Artificial Sequence
  peptide
DNEDEVDEQA

SEQ ID NO: 229 - protein, 7 aa, Artificial Sequence
  peptide
VDEQAEQ

SEQ ID NO: 230 - protein, 13 aa, Artificial Sequence
  peptide
EDEVDEQAEQQKT

SEQ ID NO: 231 - protein, 10 aa, Artificial Sequence
  peptide
EDEVDEQAEQ

SEQ ID NO: 232 - protein, 13 aa, Artificial Sequence
  peptide
DEVDEQAEQQKTH

SEQ ID NO: 233 - protein, 13 aa, Artificial Sequence
  peptide
NEDEVDEQAEQQK

SEQ ID NO: 234 - protein, 10 aa, Artificial Sequence
  peptide
DEVDEQAEQQ

SEQ ID NO: 235 - protein, 13 aa, Artificial Sequence
  peptide
EINLEEEDDDNED

SEQ ID NO: 236 - protein, 13 aa, Artificial Sequence
  peptide
NLEEEDDDNEDEV

SEQ ID NO: 237 - protein, 7 aa, Artificial Sequence
  peptide
INLEEED

SEQ ID NO: 238 - protein, 10 aa, Artificial Sequence
  peptide
LEEEDDDNED

SEQ ID NO: 239 - protein, 13 aa, Artificial Sequence
  peptide
INLEEEDDDNEDE

SEQ ID NO: 240 - protein, 13 aa, Artificial Sequence
  peptide
DDDNEDEVDEQAE

SEQ ID NO: 241 - protein, 13 aa, Artificial Sequence
  peptide
LEEEDDDNEDEVD

SEQ ID NO: 242 - protein, 10 aa, Artificial Sequence
  peptide
DDNEDEVDEQ

SEQ ID NO: 243 - protein, 7 aa, Artificial Sequence
  peptide
EDDDNED

SEQ ID NO: 244 - protein, 7 aa, Artificial Sequence
  peptide
NLEEEDD

SEQ ID NO: 245 - protein, 7 aa, Artificial Sequence
  peptide
DDNEDEV

SEQ ID NO: 246 - protein, 10 aa, Artificial Sequence
  peptide
DDDNEDEVDE

SEQ ID NO: 247 - protein, 7 aa, Artificial Sequence
  peptide
DDDNEDE

SEQ ID NO: 248 - protein, 10 aa, Artificial Sequence
  peptide
EEEDDDNEDE

SEQ ID NO: 249 - protein, 7 aa, Artificial Sequence
  peptide
EEDDDNE

SEQ ID NO: 250 - protein, 10 aa, Artificial Sequence
  peptide
EDDDNEDEVD

SEQ ID NO: 251 - protein, 7 aa, Artificial Sequence
  peptide
EDEVDEQ

SEQ ID NO: 252 - protein, 13 aa, Artificial Sequence
  peptide
EEDDDNEDEVDEQ

SEQ ID NO: 253 - protein, 10 aa, Artificial Sequence
  peptide
EEDDDNEDEV

SEQ ID NO: 254 - protein, 13 aa, Artificial Sequence
  peptide
EEEDDDNEDEVDE

SEQ ID NO: 255 - protein, 10 aa, Artificial Sequence
  peptide
EVDEQAEQQK

SEQ ID NO: 256 - protein, 13 aa, Artificial Sequence
  peptide
DNEDEVDEQAEQQ

SEQ ID NO: 257 - protein, 10 aa, Artificial Sequence
  peptide
VDEQAEQQKT

SEQ ID NO: 258 - protein, 13 aa, Artificial Sequence
  peptide
EVDEQAEQQKTHV

SEQ ID NO: 259 - protein, 13 aa, Artificial Sequence
  peptide
VDEQAEQQKTHVF

SEQ ID NO: 260 - protein, 7 aa, Artificial Sequence
  peptide
ALEINLE

SEQ ID NO: 261 - protein, 13 aa, Artificial Sequence
  peptide
WDEAATALEINLE

SEQ ID NO: 262 - protein, 10 aa, Artificial Sequence
  peptide
AATALEINLE

SEQ ID NO: 263 - protein, 13 aa, Artificial Sequence
  peptide
EWDEAATALEINL

SEQ ID NO: 264 - protein, 10 aa, Artificial Sequence
  peptide
EAATALEINL

SEQ ID NO: 265 - protein, 10 aa, Artificial Sequence
  peptide
LYSEDVDIET

SEQ ID NO: 266 - protein, 13 aa, Artificial Sequence
  peptide
LYSEDVDIETPDT

SEQ ID NO: 267 - protein, 13 aa, Artificial Sequence
  peptide
KVVLYSEDVDIET

SEQ ID NO: 268 - protein, 7 aa, Artificial Sequence
  peptide
IETPDTH

SEQ ID NO: 269 - protein, 10 aa, Artificial Sequence
  peptide
VDIETPDTHI

SEQ ID NO: 270 - protein, 10 aa, Artificial Sequence
  peptide
VLYSEDVDIE

SEQ ID NO: 271 - protein, 13 aa, Artificial Sequence
  peptide
DVDIETPDTHISY

SEQ ID NO: 272 - protein, 13 aa, Artificial Sequence
  peptide
VVLYSEDVDIETP

SEQ ID NO: 273 - protein, 13 aa, Artificial Sequence
  peptide
SEDVDIETPDTHI

SEQ ID NO: 274 - protein, 7 aa, Artificial Sequence
  peptide
ETPDTHI

SEQ ID NO: 275 - protein, 13 aa, Artificial Sequence
  peptide
VLYSEDVDIETPD

SEQ ID NO: 276 - protein, 10 aa, Artificial Sequence
  peptide
DVDIETPDTH

SEQ ID NO: 277 - protein, 10 aa, Artificial Sequence
  peptide
DIETPDTHIS

SEQ ID NO: 278 - protein, 13 aa, Artificial Sequence
  peptide
EDVDIETPDTHIS

SEQ ID NO: 279 - protein, 10 aa, Artificial Sequence
  peptide
IETPDTHISY

SEQ ID NO: 280 - protein, 13 aa, Artificial Sequence
  peptide
YSEDVDIETPDTH

SEQ ID NO: 281 - protein, 13 aa, Artificial Sequence
  peptide
VDIETPDTHISYM

SEQ ID NO: 282 - protein, 13 aa, Artificial Sequence
  peptide
PKVVLYSEDVDIE

SEQ ID NO: 283 - protein, 7 aa, Artificial Sequence
  peptide
DIETPDT

SEQ ID NO: 284 - protein, 13 aa, Artificial Sequence
  peptide
DIETPDTHISYMP

SEQ ID NO: 285 - protein, 10 aa, Artificial Sequence
  peptide
EDVDIETPDT

SEQ ID NO: 286 - protein, 10 aa, Artificial Sequence
  peptide
ETPDTHISYM

SEQ ID NO: 287 - protein, 12 aa, Artificial Sequence
  peptide
IETPDTHISYMP

SEQ ID NO: 288 - protein, 10 aa, Artificial Sequence
  peptide
DRMYSFFRNF

SEQ ID NO: 289 - protein, 7 aa, Artificial Sequence
  peptide
DRMYSFF

SEQ ID NO: 290 - protein, 7 aa, Artificial Sequence
  peptide
YSFFRNF

SEQ ID NO: 291 - protein, 13 aa, Artificial Sequence
  peptide
IPESYKDRMYSFF

SEQ ID NO: 292 - protein, 10 aa, Artificial Sequence
  peptide
SYKDRMYSFF

SEQ ID NO: 293 - protein, 10 aa, Artificial Sequence
  peptide
ESYKDRMYSF

SEQ ID NO: 294 - protein, 7 aa, Artificial Sequence
  peptide
KDRMYSF

SEQ ID NO: 295 - protein, 13 aa, Artificial Sequence
  peptide
YIPESYKDRMYSF

SEQ ID NO: 296 - protein, 13 aa, Artificial Sequence
  peptide
PESYKDRMYSFFR

SEQ ID NO: 297 - protein, 10 aa, Artificial Sequence
  peptide
YKDRMYSFFR

SEQ ID NO: 298 - protein, 7 aa, Artificial Sequence
  peptide
TRYFSMW

SEQ ID NO: 299 - protein, 7 aa, Artificial Sequence
  peptide
GDRTRYF

SEQ ID NO: 300 - protein, 10 aa, Artificial Sequence
  peptide
DSIGDRTRYF

SEQ ID NO: 301 - protein, 13 aa, Artificial Sequence
  peptide
DSIGDRTRYFSMW

SEQ ID NO: 302 - protein, 10 aa, Artificial Sequence
  peptide
GDRTRYFSMW

SEQ ID NO: 303 - protein, 10 aa, Artificial Sequence
  peptide
DRMYSFFRNF

SEQ ID NO: 304 - protein, 13 aa, Artificial Sequence
  peptide
SYKDRMYSFFRNF

SEQ ID NO: 305 - protein, 10 aa, Artificial Sequence
  peptide
NYNIGYQGFY

SEQ ID NO: 306 - protein, 10 aa, Artificial Sequence
  peptide
ANYNIGYQGF

SEQ ID NO: 307 - protein, 13 aa, Artificial Sequence
  peptide
MLANYNIGYQGFY

SEQ ID NO: 308 - protein, 7 aa, Artificial Sequence
  peptide
IGYQGFY

SEQ ID NO: 309 - protein, 13 aa, Artificial Sequence
  peptide
FLVQMLANYNIGY

SEQ ID NO: 310 - protein, 7 aa, Artificial Sequence
  peptide
NIGYQGF

SEQ ID NO: 311 - protein, 13 aa, Artificial Sequence
  peptide
QMLANYNIGYQGF

SEQ ID NO: 312 - protein, 7 aa, Artificial Sequence
  peptide
YLQGPIW

SEQ ID NO: 313 - protein, 7 aa, Artificial Sequence
  peptide
VYLQGPI

SEQ ID NO: 314 - protein, 7 aa, Artificial Sequence
  peptide
WQNRDVY

SEQ ID NO: 315 - protein, 7 aa, Artificial Sequence
  peptide
DVYLQGP

SEQ ID NO: 316 - protein, 7 aa, Artificial Sequence
  peptide
QNRDVYL

SEQ ID NO: 317 - protein, 7 aa, Artificial Sequence
  peptide
LQGPIWA

SEQ ID NO: 318 - protein, 7 aa, Artificial Sequence
  peptide
RDVYLQG

SEQ ID NO: 319 - protein, 7 aa, Artificial Sequence
  peptide
NRDVYLQ

SEQ ID NO: 320 - protein, 13 aa, Artificial Sequence
  peptide
YFGYSTPWGYFDF

SEQ ID NO: 321 - protein, 10 aa, Artificial Sequence
  peptide
FGYSTPWGYF

SEQ ID NO: 322 - protein, 10 aa, Artificial Sequence
  peptide
GYSTPWGYFD

SEQ ID NO: 323 - protein, 10 aa, Artificial Sequence
  peptide
YSTPWGYFDF

SEQ ID NO: 324 - protein, 13 aa, Artificial Sequence
  peptide
NTYFGYSTPWGYF

SEQ ID NO: 325 - protein, 13 aa, Artificial Sequence
  peptide
TPWGYFDFNRFHC

SEQ ID NO: 326 - protein, 13 aa, Artificial Sequence
  peptide
TYFGYSTPWGYFD

SEQ ID NO: 327 - protein, 13 aa, Artificial Sequence
  peptide
DNTYFGYSTPWGY

SEQ ID NO: 328 - protein, 10 aa, Artificial Sequence
  peptide
YFGYSTPWGY

SEQ ID NO: 329 - protein, 13 aa, Artificial Sequence
  peptide
FGYSTPWGYFDFN

SEQ ID NO: 330 - protein, 7 aa, Artificial Sequence
  peptide
NWLPGPC

SEQ ID NO: 331 - protein, 7 aa, Artificial Sequence
  peptide
WLPGPCY

SEQ ID NO: 332 - protein, 10 aa, Artificial Sequence
  peptide
QAKNWLPGPC

SEQ ID NO: 333 - protein, 10 aa, Artificial Sequence
  peptide
AKNWLPGPCY

SEQ ID NO: 334 - protein, 13 aa, Artificial Sequence
  peptide
MANQAKNWLPGPC

SEQ ID NO: 335 - protein, 7 aa, Artificial Sequence
  peptide
QGCLPPF

SEQ ID NO: 336 - protein, 7 aa, Artificial Sequence
  peptide
GCLPPFP

SEQ ID NO: 337 - protein, 13 aa, Artificial Sequence
  peptide
VLGSAHQGCLPPF

SEQ ID NO: 338 - protein, 13 aa, Artificial Sequence
  peptide
LPYVLGSAHQGCL

SEQ ID NO: 339 - protein, 10 aa, Artificial Sequence
  peptide
YVLGSAHQGC

SEQ ID NO: 340 - protein, 7 aa, Artificial Sequence
  peptide
CLPPFPA

SEQ ID NO: 341 - protein, 10 aa, Artificial Sequence
  peptide
SAHQGCLPPF

SEQ ID NO: 342 - protein, 10 aa, Artificial Sequence
  peptide
VLGSAHQGCL

SEQ ID NO: 343 - protein, 13 aa, Artificial Sequence
  peptide
PYVLGSAHQGCLP

SEQ ID NO: 344 - protein, 7 aa, Artificial Sequence
  peptide
GRSSFYC

SEQ ID NO: 345 - protein, 13 aa, Artificial Sequence
  peptide
AVGRSSFYCLEYF

SEQ ID NO: 346 - protein, 10 aa, Artificial Sequence
  peptide
AVGRSSFYCL

SEQ ID NO: 347 - protein, 13 aa, Artificial Sequence
  peptide
QAVGRSSFYCLEY

SEQ ID NO: 348 - protein, 13 aa, Artificial Sequence
  peptide
NGSQAVGRSSFYC

SEQ ID NO: 349 - protein, 7 aa, Artificial Sequence
  peptide
DQYLYYL

SEQ ID NO: 350 - protein, 10 aa, Artificial Sequence
  peptide
PLIDQYLYYL

SEQ ID NO: 351 - protein, 7 aa, Artificial Sequence
  peptide
IDQYLYY

SEQ ID NO: 352 - protein, 10 aa, Artificial Sequence
  peptide
FFPSNGILIF

SEQ ID NO: 353 - protein, 13 aa, Artificial Sequence
  peptide
EERFFPSNGILIF

SEQ ID NO: 354 - protein, 10 aa, Artificial Sequence
  peptide
VGSSSGNWHC

SEQ ID NO: 355 - protein, 13 aa, Artificial Sequence
  peptide
ADGVGSSSGNWHC

SEQ ID NO: 356 - protein, 15 aa, Artificial Sequence
  peptide
CGRPQKRPSCIGCKG

SEQ ID NO: 357 - protein, 22 aa, Artificial Sequence
  peptide
LKWNPDDYGGVKKIHIPSEKGC

SEQ ID NO: 358 - protein, 13 aa, Artificial Sequence
  peptide
DHTLYTPYHTHPG

SEQ ID NO: 359 - protein, 11 aa, Artificial Sequence
  peptide
GRPQKRPSCIG

SEQ ID NO: 360 - protein, 11 aa, Artificial Sequence
  peptide
VKKIHIPSEKG

SEQ ID NO: 361 - protein, 12 aa, Artificial Sequence
  peptide
GGVKKIHIPSEK

SEQ ID NO: 362 - protein, 12 aa, Artificial Sequence
  peptide
VKKIHIPSEKGC

SEQ ID NO: 363 - protein, 23 aa, Artificial Sequence
  peptide
IPNPLLGLDGGSGDYKDDDDKGK

SEQ ID NO: 364 - protein, 24 aa, Artificial Sequence
  peptide
VKKIHIPSEKGGSGDYKDDDDKGK

SEQ ID NO: 365 - protein, 13 aa, Artificial Sequence
  peptide
CSGRVEVKVQEEW

SEQ ID NO: 366 - protein, 36 aa, Artificial Sequence
  peptide
DGENKCSGRVEVKVQEEWGTVCNNGWSMEAVSVICN

SEQ ID NO: 367 - protein, 33 aa, Artificial Sequence
  peptide
RIWMDHVSCRGNESALWDCKHDGWGKHSNCTHQ

SEQ ID NO: 368 - protein, 13 aa, Artificial Sequence
  peptide
VTNAPGEMKKELR

SEQ ID NO: 369 - protein, 13 aa, Artificial Sequence
  peptide
ASAVTNAPGEMKK

SEQ ID NO: 370 - protein, 10 aa, Artificial Sequence
  peptide
VTNAPGEMKK

SEQ ID NO: 371 - protein, 7 aa, Artificial Sequence
  peptide
VTNAPGE

SEQ ID NO: 372 - protein, 13 aa, Artificial Sequence
  peptide
GSASAVTNAPGEM

SEQ ID NO: 373 - protein, 13 aa, Artificial Sequence
  peptide
AVTNAPGEMKKEL

SEQ ID NO: 374 - protein, 13 aa, Artificial Sequence
  peptide
SASAVTNAPGEMK

SEQ ID NO: 375 - protein, 13 aa, Artificial Sequence
  peptide
SGSASAVTNAPGE

SEQ ID NO: 376 - protein, 10 aa, Artificial Sequence
  peptide
AVTNAPGEMK

SEQ ID NO: 377 - protein, 10 aa, Artificial Sequence
  peptide
SAVTNAPGEM

SEQ ID NO: 378 - protein, 10 aa, Artificial Sequence
  peptide
ASAVTNAPGE

SEQ ID NO: 379 - protein, 13 aa, Artificial Sequence
  peptide
SAVTNAPGEMKKE

SEQ ID NO: 380 - protein, 10 aa, Artificial Sequence
  peptide
TNAPGEMKKE

SEQ ID NO: 381 - protein, 10 aa, Artificial Sequence
  peptide
TNAPGEMKKE

SEQ ID NO: 382 - protein, 22 aa, Artificial Sequence
  peptide
VTNAPGEMKKELRLAGGENNCS

SEQ ID NO: 383 - protein, 15 aa, Artificial Sequence
  peptide derived from viral capsid protein
LRTGNNFEFSYQFED

SEQ ID NO: 384 - protein, 15 aa, Artificial Sequence
  peptide derived from viral capsid protein
TGNNFEFSYQFEDVP

SEQ ID NO: 385 - protein, 15 aa, Artificial Sequence
  peptide derived from viral capsid protein
VATEQYGVVADNLQQ

SEQ ID NO: 386 - protein, 15 aa, Artificial Sequence
  peptide derived from viral capsid protein
FEFSYFEDVPFHSSY

SEQ ID NO: 387 - protein, 15 aa, Artificial Sequence
  peptide derived from viral capsid protein
RTGNFEFSYFEDVPF

SEQ ID NO: 388 - protein, 15 aa, Artificial Sequence
  peptide derived from viral capsid protein
MLRTGNFEFSYFEDV

SEQ ID NO: 389 - protein, 15 aa, Artificial Sequence
  peptide derived from viral capsid protein
PVPADPPTTFNQAKL

SEQ ID NO: 390 - protein, 15 aa, Artificial Sequence
  peptide derived from viral capsid protein
TQSTGGTAGTQQLLF

SEQ ID NO: 391 - protein, 15 aa, Artificial Sequence
  peptide derived from viral capsid protein
EEEIKTTNPVATEQY

SEQ ID NO: 392 - protein, 15 aa, Artificial Sequence
  peptide derived from viral capsid protein
SSVMLTSEEEIKTTN

SEQ ID NO: 393 - protein, 15 aa, Artificial Sequence
  peptide derived from viral capsid protein
VDFAVNTEGTYSEPR

SEQ ID NO: 394 - protein, 15 aa, Artificial Sequence
  peptide derived from viral capsid protein
SVPDPQPIGEPPAGP

SEQ ID NO: 395 - protein, 15 aa, Artificial Sequence
  peptide derived from viral capsid protein
EEIKTTNPVATEQYG

SEQ ID NO: 396 - protein, 15 aa, Artificial Sequence
  peptide derived from viral capsid protein
PIGEPPAGPSGLGSG

SEQ ID NO: 397 - protein, 15 aa, Artificial Sequence
  peptide derived from viral capsid protein
VNTEGTYSEPRPIGT

SEQ ID NO: 398 - protein, 15 aa, Artificial Sequence
  peptide derived from viral capsid protein
YSSVMLTSEEEIKTT

SEQ ID NO: 399 - protein, 15 aa, Artificial Sequence
  peptide derived from viral capsid protein
VATNHQSAQTLAVPF

SEQ ID NO: 400 - protein, 15 aa, Artificial Sequence
  peptide derived from viral capsid protein
VSTNLQRGNLALGET

SEQ ID NO: 401 - protein, 15 aa, Artificial Sequence
  peptide derived from viral capsid protein
ALGETTRPATAAQTQ

SEQ ID NO: 402 - protein, 15 aa, Artificial Sequence
  peptide derived from viral capsid protein
TQTTGGTTNTQTLGF

SEQ ID NO: 403 - protein, 15 aa, Artificial Sequence
  peptide derived from viral capsid protein
DDEEKFFPQSGVLIF

SEQ ID NO: 404 - protein, 15 aa, Artificial Sequence
  peptide derived from viral capsid protein
EEEIRTTNPVATEQY

SEQ ID NO: 405 - protein, 15 aa, Artificial Sequence
  peptide derived from viral capsid protein
PVEPDSSSGTGKAGQ

SEQ ID NO: 406 - protein, 15 aa, Artificial Sequence
  peptide derived from viral capsid protein
IQYTSNYNKSVNVDF

SEQ ID NO: 407 - protein, 15 aa, Artificial Sequence
  peptide derived from viral capsid protein
TDEEEIRTTNPVATE

SEQ ID NO: 408 - protein, 15 aa, Artificial Sequence
  peptide derived from viral capsid protein
VDFTVDTNGVYSEPR

SEQ ID NO: 409 - protein, 15 aa, Artificial Sequence
  peptide derived from viral capsid protein
VDTNGVYSEPRPIGT

SEQ ID NO: 410 - protein, 15 aa, Artificial Sequence
  peptide derived from viral capsid protein
TMATGSGAPMADNNE

SEQ ID NO: 411 - protein, 15 aa, Artificial Sequence
  peptide derived from viral capsid protein
TSTVQVFTDSEYQLP

SEQ ID NO: 412 - protein, 15 aa, Artificial Sequence
  peptide derived from viral capsid protein
LYYLSRTNTPSGTTT

SEQ ID NO: 413 - protein, 15 aa, Artificial Sequence
  peptide derived from viral capsid protein
TADVNTQGVLPGMVW

SEQ ID NO: 414 - protein, 15 aa, Artificial Sequence
  peptide derived from viral capsid protein
GSEKTNVDIEKVMIT

SEQ ID NO: 415 - protein, 15 aa, Artificial Sequence
  peptide derived from viral capsid protein
TNTMATGSGAPMADN

SEQ ID NO: 416 - protein, 15 aa, Artificial Sequence
  peptide derived from viral capsid protein
WNPEIQYTSNYNKSV

SEQ ID NO: 417 - protein, 15 aa, Artificial Sequence
  peptide derived from viral capsid protein
SYTFEDVPFHSSYAH

SEQ ID NO: 418 - protein, 15 aa, Artificial Sequence
  peptide derived from viral capsid protein
EDVPFHSSYAHSQSL

SEQ ID NO: 419 - protein, 15 aa, Artificial Sequence
  peptide derived from viral capsid protein
SSTDPATGDVHVMGA

SEQ ID NO: 420 - protein, 15 aa, Artificial Sequence
  peptide derived from viral capsid protein
ATERFGTVAVNLQSS

SEQ ID NO: 421 - protein, 15 aa, Artificial Sequence
  peptide derived from viral capsid protein
WLEDNLSEGIREWWD

SEQ ID NO: 422 - protein, 15 aa, Artificial Sequence
  peptide derived from viral capsid protein
EEEIKATNPVATERF

SEQ ID NO: 423 - protein, 15 aa, Artificial Sequence
  peptide derived from viral capsid protein
LEDNLSEGIREWWDL

SEQ ID NO: 424 - protein, 15 aa, Artificial Sequence
  peptide derived from viral capsid protein
DAEFQERLQEDTSFG

SEQ ID NO: 425 - protein, 15 aa, Artificial Sequence
  peptide derived from viral capsid protein
EWELQKENSKRWNPE

SEQ ID NO: 426 - protein, 15 aa, Artificial Sequence
  peptide derived from viral capsid protein
SFITQYSTGQVSVEI

SEQ ID NO: 427 - protein, 15 aa, Artificial Sequence
  peptide derived from viral capsid protein
EIEWELQKENSKRWN

SEQ ID NO: 428 - protein, 15 aa, Artificial Sequence
  peptide derived from viral capsid protein
ITQYSTGQVSVEIEW

SEQ ID NO: 429 - protein, 15 aa, Artificial Sequence
  peptide derived from viral capsid protein
TDEEEIKATNPVATE

SEQ ID NO: 430 - protein, 15 aa, Artificial Sequence
  peptide derived from viral capsid protein
EEGAKTAPGKKRPVE

SEQ ID NO: 431 - protein, 15 aa, Artificial Sequence
  peptide derived from viral capsid protein
IQVKEVTTNDGVTTI

SEQ ID NO: 432 - protein, 15 aa, Artificial Sequence
  peptide derived from viral capsid protein
SDSEYQLPYVLGSAH

SEQ ID NO: 433 - protein, 15 aa, Artificial Sequence
  peptide derived from viral capsid protein
PLGEPPATPAAVGPT

SEQ ID NO: 434 - protein, 15 aa, Artificial Sequence
  peptide derived from viral capsid protein
SSASTGASNDNHYFG

SEQ ID NO: 435 - protein, 15 aa, Artificial Sequence
  peptide derived from viral capsid protein
PVDQSPQEPDSSSGV

SEQ ID NO: 436 - protein, 15 aa, Artificial Sequence
  peptide derived from viral capsid protein
EEAAKTAPGKKRPVD

SEQ ID NO: 437 - protein, 15 aa, Artificial Sequence
  peptide derived from viral capsid protein
APGKKRPVDQSPQEP

SEQ ID NO: 438 - protein, 15 aa, Artificial Sequence
  peptide derived from viral capsid protein
ILEPLGLVEEAAKTA

SEQ ID NO: 439 - protein, 15 aa, Artificial Sequence
  peptide derived from viral capsid protein
TRTVNDQGALPGMVW

SEQ ID NO: 440 - protein, 15 aa, Artificial Sequence
  peptide derived from viral capsid protein
KRPVDQSPQEPDSSS

SEQ ID NO: 441 - protein, 15 aa, Artificial Sequence
  peptide derived from viral capsid protein
PLGEPPAAPTSLGSN

SEQ ID NO: 442 - protein, 15 aa, Artificial Sequence
  peptide derived from viral capsid protein
GKKRPVDQSPQEPDS

SEQ ID NO: 443 - protein, 15 aa, Artificial Sequence
  peptide derived from viral capsid protein
KTAPGKKRPVDQSPQ

SEQ ID NO: 444 - protein, 15 aa, Artificial Sequence
  peptide derived from viral capsid protein
SNAELDNVMITDEEE

SEQ ID NO: 445 - protein, 15 aa, Artificial Sequence
  peptide derived from viral capsid protein
WLEDNLSEGIREWWA

SEQ ID NO: 446 - protein, 15 aa, Artificial Sequence
  peptide derived from viral capsid protein
PVPADPPTAFNKDKL

SEQ ID NO: 447 - protein, 15 aa, Artificial Sequence
  peptide derived from viral capsid protein
EFENVPFHSSYAHSQ

SEQ ID NO: 448 - protein, 15 aa, Artificial Sequence
  peptide derived from viral capsid protein
FQERLKEDTSFGGNL

SEQ ID NO: 449 - protein, 15 aa, Artificial Sequence
  peptide derived from viral capsid protein
PQILIKNTPVPADPP

SEQ ID NO: 450 - protein, 15 aa, Artificial Sequence
  peptide derived from viral capsid protein
ADAEFQERLKEDTSF

SEQ ID NO: 451 - protein, 15 aa, Artificial Sequence
  peptide derived from viral capsid protein
EEIKTTNPVATESYG

SEQ ID NO: 452 - protein, 15 aa, Artificial Sequence
  peptide derived from viral capsid protein
VEFAVNTEGVYSEPR

SEQ ID NO: 453 - protein, 15 aa, Artificial Sequence
  peptide derived from viral capsid protein
AEFQERLKEDTSFGG

SEQ ID NO: 454 - protein, 15 aa, Artificial Sequence
  peptide derived from viral capsid protein
EPDSSAGIGKSGAQP

SEQ ID NO: 455 - protein, 15 aa, Artificial Sequence
  peptide derived from viral capsid protein
LIKNTPVPADPPTAF

SEQ ID NO: 456 - protein, 15 aa, Artificial Sequence
  peptide derived from viral capsid protein
VMITNEEEIKTTNPV

SEQ ID NO: 457 - protein, 15 aa, Artificial Sequence
  peptide derived from viral capsid protein
VNTEGVYSEPRPIGT

SEQ ID NO: 458 - protein, 15 aa, Artificial Sequence
  peptide derived from viral capsid protein
DKLNSFITQYSTGQV

SEQ ID NO: 459 - protein, 15 aa, Artificial Sequence
  peptide derived from viral capsid protein
VATESYGQVATNHQS

SEQ ID NO: 460 - protein, 15 aa, Artificial Sequence
  peptide derived from viral capsid protein
DDEERFFPSNGILIF

SEQ ID NO: 461 - protein, 15 aa, Artificial Sequence
  peptide derived from viral capsid protein
EEEIKTTNPVATEEY

SEQ ID NO: 462 - protein, 15 aa, Artificial Sequence
  peptide derived from viral capsid protein
PVPADPPTTFNQSKL

SEQ ID NO: 463 - protein, 15 aa, Artificial Sequence
  peptide derived from viral capsid protein
LIKNTPVPADPPTTF

SEQ ID NO: 464 - protein, 15 aa, Artificial Sequence
  peptide derived from viral capsid protein
SSSGNWHCDSTWLGD

SEQ ID NO: 465 - protein, 15 aa, Artificial Sequence
  peptide derived from viral capsid protein
TSVDFAVNTEGVYSE

SEQ ID NO: 466 - protein, 15 aa, Artificial Sequence
  peptide derived from viral capsid protein
TTTGQNNNSNFAWTA

SEQ ID NO: 467 - protein, 15 aa, Artificial Sequence
  peptide derived from viral capsid protein
VDFAVNTEGVYSEPR

SEQ ID NO: 468 - protein, 15 aa, Artificial Sequence
  peptide derived from viral capsid protein
VSTTTGQNNNSNFAW

SEQ ID NO: 469 - protein, 15 aa, Artificial Sequence
  peptide derived from viral capsid protein
KTAPGKKRPVEPSPQ

SEQ ID NO: 470 - protein, 15 aa, Artificial Sequence
  peptide derived from viral capsid protein
TQTTGGTANTQTLGF

SEQ ID NO: 471 - protein, 15 aa, Artificial Sequence
  peptide derived from viral capsid protein
VLEPLGLVEEGAKTA

SEQ ID NO: 472 - protein, 15 aa, Artificial Sequence
  peptide derived from viral capsid protein
EEVGEGLREFLGLEA

SEQ ID NO: 473 - protein, 15 aa, Artificial Sequence
  peptide derived from viral capsid protein
DAEFQEKLADDTSFG

SEQ ID NO: 474 - protein, 15 aa, Artificial Sequence
  peptide derived from viral capsid protein
SFVDHPPDWLEEVGE

SEQ ID NO: 475 - protein, 15 aa, Artificial Sequence
  peptide derived from viral capsid protein
EWELKKENSKRWNPE

SEQ ID NO: 476 - protein, 15 aa, Artificial Sequence
  peptide derived from viral capsid protein
EMEWELKKENSKRWN

SEQ ID NO: 477 - protein, 15 aa, Artificial Sequence
  peptide derived from viral capsid protein
TNNYNDPQFVDFAPD

SEQ ID NO: 478 - protein, 15 aa, Artificial Sequence
  peptide derived from viral capsid protein
FEEVPFHSSFAPSQN

SEQ ID NO: 479 - protein, 15 aa, Artificial Sequence
  peptide derived from viral capsid protein
QYTNNYNDPQFVDFA

SEQ ID NO: 480 - protein, 15 aa, Artificial Sequence
  peptide derived from viral capsid protein
TSTVQVFTDDDYQLP

SEQ ID NO: 481 - protein, 15 aa, Artificial Sequence
  peptide derived from viral capsid protein
EDSKPSTSSDAEAGP

SEQ ID NO: 482 - protein, 15 aa, Artificial Sequence
  peptide derived from viral capsid protein
EEGAKTAPTGKRIDD

SEQ ID NO: 483 - protein, 15 aa, Artificial Sequence
  peptide derived from viral capsid protein
EVPFHSSFAPSQNLF

SEQ ID NO: 484 - protein, 15 aa, Artificial Sequence
  peptide derived from viral capsid protein
SSFITQYSTGQVTVE

SEQ ID NO: 485 - protein, 15 aa, Artificial Sequence
  peptide derived from viral capsid protein
ELEGASYQVPPQPNG

SEQ ID NO: 486 - protein, 15 aa, Artificial Sequence
  peptide derived from viral capsid protein
ERDVYLQGPIWAKIP

SEQ ID NO: 487 - protein, 15 aa, Artificial Sequence
  peptide derived from viral capsid protein
PQYGYATLNRDNTEN

SEQ ID NO: 488 - protein, 15 aa, Artificial Sequence
  peptide derived from viral capsid protein
QVTVEMEWELKKENS

SEQ ID NO: 489 - protein, 15 aa, Artificial Sequence
  peptide derived from viral capsid protein
VTVQDSTTTIANNLT

SEQ ID NO: 490 - protein, 15 aa, Artificial Sequence
  peptide derived from viral capsid protein
YNEQLEAGDNPYLKY

SEQ ID NO: 491 - protein, 15 aa, Artificial Sequence
  peptide derived from viral capsid protein
YNNHQYREIKSGSVD

SEQ ID NO: 492 - protein, 15 aa, Artificial Sequence
  peptide derived from viral capsid protein
TSSDAEAGPSGSQQL

SEQ ID NO: 493 - protein, 15 aa, Artificial Sequence
  peptide derived from viral capsid protein
FEFSYQFEDVPFHSS

SEQ ID NO: 494 - protein, 15 aa, Artificial Sequence
  peptide derived from viral capsid protein
NNFEFSYQFEDVPFH

SEQ ID NO: 495 - protein, 15 aa, Artificial Sequence
  peptide derived from viral capsid protein
YQFEDVPFHSSYAHS

SEQ ID NO: 496 - protein, 15 aa, Artificial Sequence
  peptide derived from viral capsid protein
QGAGKDNVDYSSVML

SEQ ID NO: 497 - protein, 15 aa, Artificial Sequence
  peptide derived from viral capsid protein
TPVPADPPTTFSQAK

SEQ ID NO: 498 - protein, 15 aa, Artificial Sequence
  peptide derived from viral capsid protein
IKTTNPVATEQYGVV

SEQ ID NO: 499 - protein, 15 aa, Artificial Sequence
  peptide derived from viral capsid protein
GNFEFSYFEDVPFHS

SEQ ID NO: 500 - protein, 15 aa, Artificial Sequence
  peptide derived from viral capsid protein
FSYFEDVPFHSSYAH

SEQ ID NO: 501 - protein, 15 aa, Artificial Sequence
  peptide derived from viral capsid protein
YFEDVPFHSSYAHSQ

SEQ ID NO: 502 - protein, 15 aa, Artificial Sequence
  peptide derived from viral capsid protein
EYFPSQMLRTGNFEF

SEQ ID NO: 503 - protein, 15 aa, Artificial Sequence
  peptide derived from viral capsid protein
EIKTTNPVATEQYGW

SEQ ID NO: 504 - protein, 15 aa, Artificial Sequence
  peptide derived from viral capsid protein
RTQSTGGTAGTQQLL

SEQ ID NO: 505 - protein, 15 aa, Artificial Sequence
  peptide derived from viral capsid protein
DNVDYSSVMLTSEEE

SEQ ID NO: 506 - protein, 15 aa, Artificial Sequence
  peptide derived from viral capsid protein
DEERFFPSSGVLMFG

SEQ ID NO: 507 - protein, 15 aa, Artificial Sequence
  peptide derived from viral capsid protein
TNVDFAVNTEGTYSE

SEQ ID NO: 508 - protein, 15 aa, Artificial Sequence
  peptide derived from viral capsid protein
EIQYTSNYYKSTNVD

SEQ ID NO: 509 - protein, 15 aa, Artificial Sequence
  peptide derived from viral capsid protein
RVSTTLSQNNNSNFA

SEQ ID NO: 510 - protein, 15 aa, Artificial Sequence
  peptide derived from viral capsid protein
SESVPDPQPIGEPPA

SEQ ID NO: 511 - protein, 15 aa, Artificial Sequence
  peptide derived from viral capsid protein
QRVSTTLSQNNNSNF

SEQ ID NO: 512 - protein, 15 aa, Artificial Sequence
  peptide derived from viral capsid protein
VDYSSVMLTSEEEIK

SEQ ID NO: 513 - protein, 15 aa, Artificial Sequence
  peptide derived from viral capsid protein
PQPIGEPPAGPSGLG

SEQ ID NO: 514 - protein, 15 aa, Artificial Sequence
  peptide derived from viral capsid protein
QQRVSTTLSQNNNSN

SEQ ID NO: 515 - protein, 15 aa, Artificial Sequence
  peptide derived from viral capsid protein
VSTTLSQNNNSNFAW

SEQ ID NO: 516 - protein, 15 aa, Artificial Sequence
  peptide derived from viral capsid protein
TTRPATAPQIGTVNS

SEQ ID NO: 517 - protein, 15 aa, Artificial Sequence
  peptide derived from viral capsid protein
EYGAVAINNQAANLA

SEQ ID NO: 518 - protein, 15 aa, Artificial Sequence
  peptide derived from viral capsid protein
TTRPATAAQTQVVNN

SEQ ID NO: 519 - protein, 15 aa, Artificial Sequence
  peptide derived from viral capsid protein
NQSLALGETTRPAST

SEQ ID NO: 520 - protein, 15 aa, Artificial Sequence
  peptide derived from viral capsid protein
GQMATNNQSLALGET

SEQ ID NO: 521 - protein, 15 aa, Artificial Sequence
  peptide derived from viral capsid protein
MATNNQSLALGETTR

SEQ ID NO: 522 - protein, 15 aa, Artificial Sequence
  peptide derived from viral capsid protein
TNNQSLALGETTRPA

SEQ ID NO: 523 - protein, 15 aa, Artificial Sequence
  peptide derived from viral capsid protein
DSVPDPQPIGEPPAA

SEQ ID NO: 524 - protein, 15 aa, Artificial Sequence
  peptide derived from viral capsid protein
TGDADSVPDPQPIGE

SEQ ID NO: 525 - protein, 15 aa, Artificial Sequence
  peptide derived from viral capsid protein
SLTMAAGGGAPMADN

SEQ ID NO: 526 - protein, 15 aa, Artificial Sequence
  peptide derived from viral capsid protein
TTGGTTNTQTLGFSQ

SEQ ID NO: 527 - protein, 15 aa, Artificial Sequence
  peptide derived from viral capsid protein
LYYLSRTQTTGGTTN

SEQ ID NO: 528 - protein, 15 aa, Artificial Sequence
  peptide derived from viral capsid protein
SRTQTTGGTTNTQTL

SEQ ID NO: 529 - protein, 15 aa, Artificial Sequence
  peptide derived from viral capsid protein
YLSRTQTTGGTTNTQ

SEQ ID NO: 530 - protein, 15 aa, Artificial Sequence
  peptide derived from viral capsid protein
DGYLPDWLEDTLSEG

SEQ ID NO: 531 - protein, 15 aa, Artificial Sequence
  peptide derived from viral capsid protein
PPFPADVFMVPQYGY

SEQ ID NO: 532 - protein, 15 aa, Artificial Sequence
  peptide derived from viral capsid protein
GEPVNEADAAALEHD

SEQ ID NO: 533 - protein, 15 aa, Artificial Sequence
  peptide derived from viral capsid protein
VNVDFTVDTNGVYSE

SEQ ID NO: 534 - protein, 15 aa, Artificial Sequence
  peptide derived from viral capsid protein
EEKFFPQSGVLIFGK

SEQ ID NO: 535 - protein, 15 aa, Artificial Sequence
  peptide derived from viral capsid protein
PDWLEDTLSEGIRQW

SEQ ID NO: 536 - protein, 15 aa, Artificial Sequence
  peptide derived from viral capsid protein
PVNEADAAALEHDKA

SEQ ID NO: 537 - protein, 15 aa, Artificial Sequence
  peptide derived from viral capsid protein
TNVDIEKVMITDEEE

SEQ ID NO: 538 - protein, 15 aa, Artificial Sequence
  peptide derived from viral capsid protein
VDIEKVMITDEEEIR

SEQ ID NO: 539 - protein, 15 aa, Artificial Sequence
  peptide derived from viral capsid protein
PEIQYTSNYNKSVNV

SEQ ID NO: 540 - protein, 15 aa, Artificial Sequence
  peptide derived from viral capsid protein
VEEPVKTAPGKKRPV

SEQ ID NO: 541 - protein, 15 aa, Artificial Sequence
  peptide derived from viral capsid protein
ASHKDDEEKFFPQSG

SEQ ID NO: 542 - protein, 15 aa, Artificial Sequence
  peptide derived from viral capsid protein
EPVNEADAAALEHDK

SEQ ID NO: 543 - protein, 15 aa, Artificial Sequence
  peptide derived from viral capsid protein
ERHKDDSRGLVLPGY

SEQ ID NO: 544 - protein, 15 aa, Artificial Sequence
  peptide derived from viral capsid protein
GNSSGNWHCDSTWMG

SEQ ID NO: 545 - protein, 15 aa, Artificial Sequence
  peptide derived from viral capsid protein
PVPANPSTTFSAAKF

SEQ ID NO: 546 - protein, 15 aa, Artificial Sequence
  peptide derived from viral capsid protein
AAALEHDKAYDRQLD

SEQ ID NO: 547 - protein, 15 aa, Artificial Sequence
  peptide derived from viral capsid protein
FNGLDKGEPVNEADA

SEQ ID NO: 548 - protein, 15 aa, Artificial Sequence
  peptide derived from viral capsid protein
YTSNYNKSVNVDFTV

SEQ ID NO: 549 - protein, 15 aa, Artificial Sequence
  peptide derived from viral capsid protein
EDTLSEGIRQWWKLK

SEQ ID NO: 550 - protein, 15 aa, Artificial Sequence
  peptide derived from viral capsid protein
EPDSSSGTGKAGQQP

SEQ ID NO: 551 - protein, 15 aa, Artificial Sequence
  peptide derived from viral capsid protein
NNSEYSWTGATKYHL

SEQ ID NO: 552 - protein, 15 aa, Artificial Sequence
  peptide derived from viral capsid protein
SNYNKSVNVDFTVDT

SEQ ID NO: 553 - protein, 15 aa, Artificial Sequence
  peptide derived from viral capsid protein
SSQSGASNDNHYFGY

SEQ ID NO: 554 - protein, 15 aa, Artificial Sequence
  peptide derived from viral capsid protein
KRWNPEIQYTSNYNK

SEQ ID NO: 555 - protein, 15 aa, Artificial Sequence
  peptide derived from viral capsid protein
YLSRTNTPSGTTTQS

SEQ ID NO: 556 - protein, 15 aa, Artificial Sequence
  peptide derived from viral capsid protein
YTFEDVPFHSSYAHS

SEQ ID NO: 557 - protein, 15 aa, Artificial Sequence
  peptide derived from viral capsid protein
FEDVPFHSSYAHSQS

SEQ ID NO: 558 - protein, 15 aa, Artificial Sequence
  peptide derived from viral capsid protein
QSSSTDPATGDVHVM

SEQ ID NO: 559 - protein, 15 aa, Artificial Sequence
  peptide derived from viral capsid protein
PDWLEDNLSEGIREW

SEQ ID NO: 560 - protein, 15 aa, Artificial Sequence
  peptide derived from viral capsid protein
DWLEDNLSEGIREWW

SEQ ID NO: 561 - protein, 15 aa, Artificial Sequence
  peptide derived from viral capsid protein
QYSTGQVSVEIEWEL

SEQ ID NO: 562 - protein, 15 aa, Artificial Sequence
  peptide derived from viral capsid protein
DGYLPDWLEDNLSEG

SEQ ID NO: 563 - protein, 15 aa, Artificial Sequence
  peptide derived from viral capsid protein
EDNLSEGIREWWDLK

SEQ ID NO: 564 - protein, 15 aa, Artificial Sequence
  peptide derived from viral capsid protein
DNHYFGYSTPWGYFD

SEQ ID NO: 565 - protein, 15 aa, Artificial Sequence
  peptide derived from viral capsid protein
PVEQSPQEPDSSSGI

SEQ ID NO: 566 - protein, 15 aa, Artificial Sequence
  peptide derived from viral capsid protein
ADGYLPDWLEDNLSE

SEQ ID NO: 567 - protein, 15 aa, Artificial Sequence
  peptide derived from viral capsid protein
GDSESVPDPQPLGEP

SEQ ID NO: 568 - protein, 15 aa, Artificial Sequence
  peptide derived from viral capsid protein
GEPVNAADAAALEHD

SEQ ID NO: 569 - protein, 15 aa, Artificial Sequence
  peptide derived from viral capsid protein
EDTSFGGNLGRAVFQ

SEQ ID NO: 570 - protein, 15 aa, Artificial Sequence
  peptide derived from viral capsid protein
GCLPPFPADVFMIPQ

SEQ ID NO: 571 - protein, 15 aa, Artificial Sequence
  peptide derived from viral capsid protein
PVPANPPAEFSATKF

SEQ ID NO: 572 - protein, 15 aa, Artificial Sequence
  peptide derived from viral capsid protein
SESVPDPQPLGEPPA

SEQ ID NO: 573 - protein, 15 aa, Artificial Sequence
  peptide derived from viral capsid protein
EFQERLQEDTSFGGN

SEQ ID NO: 574 - protein, 15 aa, Artificial Sequence
  peptide derived from viral capsid protein
DAAALEHDKAYDQQL

SEQ ID NO: 575 - protein, 15 aa, Artificial Sequence
  peptide derived from viral capsid protein
EPVNAADAAALEHDK

SEQ ID NO: 576 - protein, 15 aa, Artificial Sequence
  peptide derived from viral capsid protein
QRVSKTKTDNNNSNF

SEQ ID NO: 577 - protein, 15 aa, Artificial Sequence
  peptide derived from viral capsid protein
DSESVPDPQPLGEPP

SEQ ID NO: 578 - protein, 15 aa, Artificial Sequence
  peptide derived from viral capsid protein
EHDKAYDQQLKAGDN

SEQ ID NO: 579 - protein, 15 aa, Artificial Sequence
  peptide derived from viral capsid protein
LPGMVWQDRDVYLQG

SEQ ID NO: 580 - protein, 15 aa, Artificial Sequence
  peptide derived from viral capsid protein
VSVEIEWELQKENSK

SEQ ID NO: 581 - protein, 15 aa, Artificial Sequence
  peptide derived from viral capsid protein
DSEYQLPYVLGSAHQ

SEQ ID NO: 582 - protein, 15 aa, Artificial Sequence
  peptide derived from viral capsid protein
PQPLGEPPATPAAVG

SEQ ID NO: 583 - protein, 15 aa, Artificial Sequence
  peptide derived from viral capsid protein
VEIEWELQKENSKRW

SEQ ID NO: 584 - protein, 15 aa, Artificial Sequence
  peptide derived from viral capsid protein
EYFPSQMLRTGNNFT

SEQ ID NO: 585 - protein, 15 aa, Artificial Sequence
  peptide derived from viral capsid protein
PLIDQYLYYLNRTQN

SEQ ID NO: 586 - protein, 15 aa, Artificial Sequence
  peptide derived from viral capsid protein
QVSVEIEWELQKENS

SEQ ID NO: 587 - protein, 15 aa, Artificial Sequence
  peptide derived from viral capsid protein
ASNDNHYFGYSTPWG

SEQ ID NO: 588 - protein, 15 aa, Artificial Sequence
  peptide derived from viral capsid protein
EIKATNPVATERFGT

SEQ ID NO: 589 - protein, 15 aa, Artificial Sequence
  peptide derived from viral capsid protein
GSAHQGCLPPFPADV

SEQ ID NO: 590 - protein, 15 aa, Artificial Sequence
  peptide derived from viral capsid protein
SSSGIGKTGQQPAKK

SEQ ID NO: 591 - protein, 15 aa, Artificial Sequence
  peptide derived from viral capsid protein
AAALEHDKAYDQQLK

SEQ ID NO: 592 - protein, 15 aa, Artificial Sequence
  peptide derived from viral capsid protein
NNFQFSYTFEDVPFH

SEQ ID NO: 593 - protein, 15 aa, Artificial Sequence
  peptide derived from viral capsid protein
TGNNFQFSYTFEDVP

SEQ ID NO: 594 - protein, 15 aa, Artificial Sequence
  peptide derived from viral capsid protein
LRTGNNFQFSYTFED

SEQ ID NO: 595 - protein, 15 aa, Artificial Sequence
  peptide derived from viral capsid protein
EADAAALEHDKAYDQ

SEQ ID NO: 596 - protein, 15 aa, Artificial Sequence
  peptide derived from viral capsid protein
PQPLGEPPAAPTSLG

SEQ ID NO: 597 - protein, 15 aa, Artificial Sequence
  peptide derived from viral capsid protein
SSSGVGKSGKQPARK

SEQ ID NO: 598 - protein, 15 aa, Artificial Sequence
  peptide derived from viral capsid protein
DDEEKFFPMHGNLIF

SEQ ID NO: 599 - protein, 15 aa, Artificial Sequence
  peptide derived from viral capsid protein
QRLSKTANDNNNSNF

SEQ ID NO: 600 - protein, 15 aa, Artificial Sequence
  peptide derived from viral capsid protein
TTSGTTNQSRLLFSQ

SEQ ID NO: 601 - protein, 15 aa, Artificial Sequence
  peptide derived from viral capsid protein
SYEFENVPFHSSYAH

SEQ ID NO: 602 - protein, 15 aa, Artificial Sequence
  peptide derived from viral capsid protein
QFSYEFENVPFHSSY

SEQ ID NO: 603 - protein, 15 aa, Artificial Sequence
  peptide derived from viral capsid protein
ERLKEDTSFGGNLGR

SEQ ID NO: 604 - protein, 15 aa, Artificial Sequence
  peptide derived from viral capsid protein
ESVPDPQPIGEPPAA

SEQ ID NO: 605 - protein, 15 aa, Artificial Sequence
  peptide derived from viral capsid protein
NNVEFAVNTEGVYSE

SEQ ID NO: 606 - protein, 15 aa, Artificial Sequence
  peptide derived from viral capsid protein
NEEEIKTTNPVATES

SEQ ID NO: 607 - protein, 15 aa, Artificial Sequence
  peptide derived from viral capsid protein
SLIFGKQGTGRDNVD

SEQ ID NO: 608 - protein, 15 aa, Artificial Sequence
  peptide derived from viral capsid protein
EDNLSEGIREWWALK

SEQ ID NO: 609 - protein, 15 aa, Artificial Sequence
  peptide derived from viral capsid protein
NSFITQYSTGQVSVE

SEQ ID NO: 610 - protein, 15 aa, Artificial Sequence
  peptide derived from viral capsid protein
SSNDNAYFGYSTPWG

SEQ ID NO: 611 - protein, 15 aa, Artificial Sequence
  peptide derived from viral capsid protein
TPVPADPPTAFNKDK

SEQ ID NO: 612 - protein, 15 aa, Artificial Sequence
  peptide derived from viral capsid protein
VEEAAKTAPGKKRPV

SEQ ID NO: 613 - protein, 15 aa, Artificial Sequence
  peptide derived from viral capsid protein
IKNTPVPADPPTAFN

SEQ ID NO: 614 - protein, 15 aa, Artificial Sequence
  peptide derived from viral capsid protein
IKTTNPVATESYGQV

SEQ ID NO: 615 - protein, 15 aa, Artificial Sequence
  peptide derived from viral capsid protein
IQYTSNYYKSNNVEF

SEQ ID NO: 616 - protein, 15 aa, Artificial Sequence
  peptide derived from viral capsid protein
QILIKNTPVPADPPT

SEQ ID NO: 617 - protein, 15 aa, Artificial Sequence
  peptide derived from viral capsid protein
AFNKDKLNSFITQYS

SEQ ID NO: 618 - protein, 15 aa, Artificial Sequence
  peptide derived from viral capsid protein
EYFPSQMLRTGNNFQ

SEQ ID NO: 619 - protein, 15 aa, Artificial Sequence
  peptide derived from viral capsid protein
ITNEEEIKTTNPVAT

SEQ ID NO: 620 - protein, 15 aa, Artificial Sequence
  peptide derived from viral capsid protein
LKEDTSFGGNLGRAV

SEQ ID NO: 621 - protein, 15 aa, Artificial Sequence
  peptide derived from viral capsid protein
VATNHQSAQAQAQTG

SEQ ID NO: 622 - protein, 15 aa, Artificial Sequence
  peptide derived from viral capsid protein
DADKVMITNEEEIKT

SEQ ID NO: 623 - protein, 15 aa, Artificial Sequence
  peptide derived from viral capsid protein
SLTMASGGGAPVADN

SEQ ID NO: 624 - protein, 15 aa, Artificial Sequence
  peptide derived from viral capsid protein
NKDKLNSFITQYSTG

SEQ ID NO: 625 - protein, 15 aa, Artificial Sequence
  peptide derived from viral capsid protein
QPIGEPPAAPSGVGS

SEQ ID NO: 626 - protein, 15 aa, Artificial Sequence
  peptide derived from viral capsid protein
DNADYSDVMLTSEEE

SEQ ID NO: 627 - protein, 15 aa, Artificial Sequence
  peptide derived from viral capsid protein
TYTFEDVPFHSSYAH

SEQ ID NO: 628 - protein, 15 aa, Artificial Sequence
  peptide derived from viral capsid protein
ARDNADYSDVMLTSE

SEQ ID NO: 629 - protein, 15 aa, Artificial Sequence
  peptide derived from viral capsid protein
IGTVNSQGALPGMVW

SEQ ID NO: 630 - protein, 15 aa, Artificial Sequence
  peptide derived from viral capsid protein
EEYGIVADNLQQQNT

SEQ ID NO: 631 - protein, 15 aa, Artificial Sequence
  peptide derived from viral capsid protein
QRVSTTTGQNNNSNF

SEQ ID NO: 632 - protein, 15 aa, Artificial Sequence
  peptide derived from viral capsid protein
DGVGSSSGNWHCDST

SEQ ID NO: 633 - protein, 15 aa, Artificial Sequence
  peptide derived from viral capsid protein
IKNTPVPADPPTTFN

SEQ ID NO: 634 - protein, 15 aa, Artificial Sequence
  peptide derived from viral capsid protein
ILIKNTPVPADPPTT

SEQ ID NO: 635 - protein, 15 aa, Artificial Sequence
  peptide derived from viral capsid protein
STIQVFTDSEYQLPY

SEQ ID NO: 636 - protein, 15 aa, Artificial Sequence
  peptide derived from viral capsid protein
CYRQQRVSTTTGQNN

SEQ ID NO: 637 - protein, 15 aa, Artificial Sequence
  peptide derived from viral capsid protein
HDKAYDQQLQAGDNP

SEQ ID NO: 638 - protein, 15 aa, Artificial Sequence
  peptide derived from viral capsid protein
LYYLSRTQTTGGTAN

SEQ ID NO: 639 - protein, 15 aa, Artificial Sequence
  peptide derived from viral capsid protein
TFNQSKLNSFITQYS

SEQ ID NO: 640 - protein, 15 aa, Artificial Sequence
  peptide derived from viral capsid protein
VTQNEGTKTIANNLT

SEQ ID NO: 641 - protein, 15 aa, Artificial Sequence
  peptide derived from viral capsid protein
QYLYYLSRTQTTGGT

SEQ ID NO: 642 - protein, 15 aa, Artificial Sequence
  peptide derived from viral capsid protein
SRTQTTGGTANTQTL

SEQ ID NO: 643 - protein, 15 aa, Artificial Sequence
  peptide derived from viral capsid protein
NTYFGYSTPWGYFDF

SEQ ID NO: 644 - protein, 15 aa, Artificial Sequence
  peptide derived from viral capsid protein
PVEPSPQRSPDSSTG

SEQ ID NO: 645 - protein, 15 aa, Artificial Sequence
  peptide derived from viral capsid protein
SVPDPQPLGEPPAAP

SEQ ID NO: 646 - protein, 15 aa, Artificial Sequence
  peptide derived from viral capsid protein
EPSPQRSPDSSTGIG

SEQ ID NO: 647 - protein, 15 aa, Artificial Sequence
  peptide derived from viral capsid protein
NNFEFTYNFEEVPFH

SEQ ID NO: 648 - protein, 15 aa, Artificial Sequence
  peptide derived from viral capsid protein
PDWLEEVGEGLREFL

SEQ ID NO: 649 - protein, 15 aa, Artificial Sequence
  peptide derived from viral capsid protein
TGNNFEFTYNFEEVP

SEQ ID NO: 650 - protein, 15 aa, Artificial Sequence
  peptide derived from viral capsid protein
LRTGNNFEFTYNFEE

SEQ ID NO: 651 - protein, 15 aa, Artificial Sequence
  peptide derived from viral capsid protein
EPVNRADEVAREHDI

SEQ ID NO: 652 - protein, 15 aa, Artificial Sequence
  peptide derived from viral capsid protein
TEEDSKPSTSSDAEA

SEQ ID NO: 653 - protein, 15 aa, Artificial Sequence
  peptide derived from viral capsid protein
TQYSTGQVTVEMEWE

SEQ ID NO: 654 - protein, 15 aa, Artificial Sequence
  peptide derived from viral capsid protein
ESETQPVNRVAYNVG

SEQ ID NO: 655 - protein, 15 aa, Artificial Sequence
  peptide derived from viral capsid protein
NLTSTVQVFTDDDYQ

SEQ ID NO: 656 - protein, 15 aa, Artificial Sequence
  peptide derived from viral capsid protein
EIQYTNNYNDPQFVD

SEQ ID NO: 657 - protein, 15 aa, Artificial Sequence
  peptide derived from viral capsid protein
PVPGNITSFSDVPVS

SEQ ID NO: 658 - protein, 15 aa, Artificial Sequence
  peptide derived from viral capsid protein
TVEMEWELKKENSKR

SEQ ID NO: 659 - protein, 15 aa, Artificial Sequence
  peptide derived from viral capsid protein
EFQEKLADDTSFGGN

SEQ ID NO: 660 - protein, 15 aa, Artificial Sequence
  peptide derived from viral capsid protein
EQLEAGDNPYLKYNH

SEQ ID NO: 661 - protein, 15 aa, Artificial Sequence
  peptide derived from viral capsid protein
NYNDPQFVDFAPDST

SEQ ID NO: 662 - protein, 15 aa, Artificial Sequence
  peptide derived from viral capsid protein
SSLGADTMSAGGGGP

SEQ ID NO: 663 - protein, 15 aa, Artificial Sequence
  peptide derived from viral capsid protein
SKPSTSSDAEAGPSG

SEQ ID NO: 664 - protein, 15 aa, Artificial Sequence
  peptide derived from viral capsid protein
FITQYSTGQVTVEME

SEQ ID NO: 665 - protein, 15 aa, Artificial Sequence
  peptide derived from viral capsid protein
EFLGLEAGPPKPKPN

SEQ ID NO: 666 - protein, 15 aa, Artificial Sequence
  peptide derived from viral capsid protein
NVGGQMATNNQSSTT

SEQ ID NO: 667 - protein, 15 aa, Artificial Sequence
  peptide derived from viral capsid protein
PSKMLRTGNNFEFTY

SEQ ID NO: 668 - protein, 15 aa, Artificial Sequence
  peptide derived from viral capsid protein
VLEPFGLVEEGAKTA

SEQ ID NO: 669 - protein, 15 aa, Artificial Sequence
  peptide derived from viral capsid protein
AQPASSLGADTMSAG

SEQ ID NO: 670 - protein, 15 aa, Artificial Sequence
  peptide derived from viral capsid protein
VQDSTTTIANNLTST

SEQ ID NO: 671 - protein, 15 aa, Artificial Sequence
  peptide derived from viral capsid protein
YLEGNMLITSESETQ

SEQ ID NO: 672 - protein, 15 aa, Artificial Sequence
  peptide derived from viral capsid protein
NVDFAVNTDGTYSEP

SEQ ID NO: 673 - protein, 15 aa, Artificial Sequence
  peptide derived from viral capsid protein
KDNVDYSSVMLTSEE

SEQ ID NO: 674 - protein, 15 aa, Artificial Sequence
  peptide derived from viral capsid protein
HDDEERFFPSSGVLM

SEQ ID NO: 675 - protein, 15 aa, Artificial Sequence
  peptide derived from viral capsid protein
SQMLRTGNFEFSYFE

SEQ ID NO: 676 - protein, 15 aa, Artificial Sequence
  peptide derived from viral capsid protein
GDSESVPDPQPIGEP

SEQ ID NO: 677 - protein, 15 aa, Artificial Sequence
  peptide derived from viral capsid protein
DNPYLRYHADAEFQE

SEQ ID NO: 678 - protein, 15 aa, Artificial Sequence
  peptide derived from viral capsid protein
NTPVPADPPTTFNQA

SEQ ID NO: 679 - protein, 15 aa, Artificial Sequence
  peptide derived from viral capsid protein
DSLVNPGVAMATHDD

SEQ ID NO: 680 - protein, 15 aa, Artificial Sequence
  peptide derived from viral capsid protein
PLGLVESPVKTAPGK

SEQ ID NO: 681 - protein, 15 aa, Artificial Sequence
  peptide derived from viral capsid protein
SRTQSTGGTAGTQQL

SEQ ID NO: 682 - protein, 15 aa, Artificial Sequence
  peptide derived from viral capsid protein
TFNQAKLASFITQYS

SEQ ID NO: 683 - protein, 15 aa, Artificial Sequence
  peptide derived from viral capsid protein
STTLSQNNNSNFAWT

SEQ ID NO: 684 - protein, 15 aa, Artificial Sequence
  peptide derived from viral capsid protein
SSTGIGKKGQQPAKK

SEQ ID NO: 685 - protein, 15 aa, Artificial Sequence
  peptide derived from viral capsid protein
KSTNVDFAVNTEGTY

SEQ ID NO: 686 - protein, 15 aa, Artificial Sequence
  peptide derived from viral capsid protein
TYSEPRPIGTRYLTR

SEQ ID NO: 687 - protein, 15 aa, Artificial Sequence
  peptide derived from viral capsid protein
EYGIVADNLQQQNLA

SEQ ID NO: 688 - protein, 15 aa, Artificial Sequence
  peptide derived from viral capsid protein
RPATAPQIGTVNSQG

SEQ ID NO: 689 - protein, 15 aa, Artificial Sequence
  peptide derived from viral capsid protein
GETTRPATAAQTQVV

SEQ ID NO: 690 - protein, 15 aa, Artificial Sequence
  peptide derived from viral capsid protein
EYGIVSSNLQAANLA

SEQ ID NO: 691 - protein, 15 aa, Artificial Sequence
  peptide derived from viral capsid protein
SNLQAANLALGETTR

SEQ ID NO: 692 - protein, 15 aa, Artificial Sequence
  peptide derived from viral capsid protein
DADSVPDPQPIGEPP

SEQ ID NO: 693 - protein, 15 aa, Artificial Sequence
  peptide derived from viral capsid protein
QGVLPGMVWQDRDVY

SEQ ID NO: 694 - protein, 15 aa, Artificial Sequence
  peptide derived from viral capsid protein
NEADAAALEHDKAYD

SEQ ID NO: 695 - protein, 15 aa, Artificial Sequence
  peptide derived from viral capsid protein
QGCLPPFPADVFMVP

SEQ ID NO: 696 - protein, 15 aa, Artificial Sequence
  peptide derived from viral capsid protein
EHDKAYDRQLDSGDN

SEQ ID NO: 697 - protein, 15 aa, Artificial Sequence
  peptide derived from viral capsid protein
PFPADVFMVPQYGYL

SEQ ID NO: 698 - protein, 15 aa, Artificial Sequence
  peptide derived from viral capsid protein
EPVKTAPGKKRPVEH

SEQ ID NO: 699 - protein, 15 aa, Artificial Sequence
  peptide derived from viral capsid protein
HKDDEEKFFPQSGVL

SEQ ID NO: 700 - protein, 15 aa, Artificial Sequence
  peptide derived from viral capsid protein
DKGEPVNEADAAALE

SEQ ID NO: 701 - protein, 15 aa, Artificial Sequence
  peptide derived from viral capsid protein
EQYGSVSTNLQRGNR

SEQ ID NO: 702 - protein, 15 aa, Artificial Sequence
  peptide derived from viral capsid protein
GPPPPKPAERHKDDS

SEQ ID NO: 703 - protein, 15 aa, Artificial Sequence
  peptide derived from viral capsid protein
IEKVMITDEEEIRTT

SEQ ID NO: 704 - protein, 15 aa, Artificial Sequence
  peptide derived from viral capsid protein
KSVNVDFTVDTNGVY

SEQ ID NO: 705 - protein, 15 aa, Artificial Sequence
  peptide derived from viral capsid protein
RPVEHSPVEPDSSSG

SEQ ID NO: 706 - protein, 15 aa, Artificial Sequence
  peptide derived from viral capsid protein
SDIRDQSRNWLPGPC

SEQ ID NO: 707 - protein, 15 aa, Artificial Sequence
  peptide derived from viral capsid protein
DNNEGADGVGNSSGN

SEQ ID NO: 708 - protein, 15 aa, Artificial Sequence
  peptide derived from viral capsid protein
PVATEQYGSVSTNLQ

SEQ ID NO: 709 - protein, 15 aa, Artificial Sequence
  peptide derived from viral capsid protein
QVKEVTQNDGTTTIA

SEQ ID NO: 710 - protein, 15 aa, Artificial Sequence
  peptide derived from viral capsid protein
STVQVFTDSEYQLPY

SEQ ID NO: 711 - protein, 15 aa, Artificial Sequence
  peptide derived from viral capsid protein
DADSVPDPQPLGQPP

SEQ ID NO: 712 - protein, 15 aa, Artificial Sequence
  peptide derived from viral capsid protein
DSGDNPYLKYNHADA

SEQ ID NO: 713 - protein, 15 aa, Artificial Sequence
  peptide derived from viral capsid protein
DSLVNPGPAMASHKD

SEQ ID NO: 714 - protein, 15 aa, Artificial Sequence
  peptide derived from viral capsid protein
ISSQSGASNDNHYFG

SEQ ID NO: 715 - protein, 15 aa, Artificial Sequence
  peptide derived from viral capsid protein
MITDEEEIRTTNPVA

SEQ ID NO: 716 - protein, 15 aa, Artificial Sequence
  peptide derived from viral capsid protein
RQWWKLKPGPPPPKP

SEQ ID NO: 717 - protein, 15 aa, Artificial Sequence
  peptide derived from viral capsid protein
VKEVTQNDGTTTIAN

SEQ ID NO: 718 - protein, 15 aa, Artificial Sequence
  peptide derived from viral capsid protein
VTQNDGTTTIANNLT

SEQ ID NO: 719 - protein, 15 aa, Artificial Sequence
  peptide derived from viral capsid protein
ADNNEGADGVGNSSG

SEQ ID NO: 720 - protein, 15 aa, Artificial Sequence
  peptide derived from viral capsid protein
PLGLVEEPVKTAPGK

SEQ ID NO: 721 - protein, 15 aa, Artificial Sequence
  peptide derived from viral capsid protein
GNNFTFSYTFEDVPF

SEQ ID NO: 722 - protein, 15 aa, Artificial Sequence
  peptide derived from viral capsid protein
FSYTFEDVPFHSSYA

SEQ ID NO: 723 - protein, 15 aa, Artificial Sequence
  peptide derived from viral capsid protein
TFSYTFEDVPFHSSY

SEQ ID NO: 724 - protein, 15 aa, Artificial Sequence
  peptide derived from viral capsid protein
DDKDKFFPMSGVMIF

SEQ ID NO: 725 - protein, 15 aa, Artificial Sequence
  peptide derived from viral capsid protein
TFEDVPFHSSYAHSQ

SEQ ID NO: 726 - protein, 15 aa, Artificial Sequence
  peptide derived from viral capsid protein
TGDVHVMGALPGMVW

SEQ ID NO: 727 - protein, 15 aa, Artificial Sequence
  peptide derived from viral capsid protein
HVMGALPGMVWQDRD

SEQ ID NO: 728 - protein, 15 aa, Artificial Sequence
  peptide derived from viral capsid protein
TVAVNLQSSSTDPAT

SEQ ID NO: 729 - protein, 15 aa, Artificial Sequence
  peptide derived from viral capsid protein
AVNLQSSSTDPATGD

SEQ ID NO: 730 - protein, 15 aa, Artificial Sequence
  peptide derived from viral capsid protein
NHYFGYSTPWGYFDF

SEQ ID NO: 731 - protein, 15 aa, Artificial Sequence
  peptide derived from viral capsid protein
GSQAVGRSSFYCLEY

SEQ ID NO: 732 - protein, 15 aa, Artificial Sequence
  peptide derived from viral capsid protein
TQYSTGQVSVEIEWE

SEQ ID NO: 733 - protein, 15 aa, Artificial Sequence
  peptide derived from viral capsid protein
YLPDWLEDNLSEGIR

SEQ ID NO: 734 - protein, 15 aa, Artificial Sequence
  peptide derived from viral capsid protein
SNTALDNVMITDEEE

SEQ ID NO: 735 - protein, 15 aa, Artificial Sequence
  peptide derived from viral capsid protein
TPWGYFDFNRFHCHF

SEQ ID NO: 736 - protein, 15 aa, Artificial Sequence
  peptide derived from viral capsid protein
YFDFNRFHCHFSPRD

SEQ ID NO: 737 - protein, 15 aa, Artificial Sequence
  peptide derived from viral capsid protein
GYLPDWLEDNLSEGI

SEQ ID NO: 738 - protein, 15 aa, Artificial Sequence
  peptide derived from viral capsid protein
YSTGQVSVEIEWELQ

SEQ ID NO: 739 - protein, 15 aa, Artificial Sequence
  peptide derived from viral capsid protein
SLDRLMNPLIDQYLY

SEQ ID NO: 740 - protein, 15 aa, Artificial Sequence
  peptide derived from viral capsid protein
STVQVFSDSEYQLPY

SEQ ID NO: 741 - protein, 15 aa, Artificial Sequence
  peptide derived from viral capsid protein
SVPDPQPLGEPPATP

SEQ ID NO: 742 - protein, 15 aa, Artificial Sequence
  peptide derived from viral capsid protein
EFSATKFASFITQYS

SEQ ID NO: 743 - protein, 15 aa, Artificial Sequence
  peptide derived from viral capsid protein
YSTPWGYFDFNRFHC

SEQ ID NO: 744 - protein, 15 aa, Artificial Sequence
  peptide derived from viral capsid protein
AHQGCLPPFPADVFM

SEQ ID NO: 745 - protein, 15 aa, Artificial Sequence
  peptide derived from viral capsid protein
ASFITQYSTGQVSVE

SEQ ID NO: 746 - protein, 15 aa, Artificial Sequence
  peptide derived from viral capsid protein
EWWDLKPGAPKPKAN

SEQ ID NO: 747 - protein, 15 aa, Artificial Sequence
  peptide derived from viral capsid protein
GEPPATPAAVGPTTM

SEQ ID NO: 748 - protein, 15 aa, Artificial Sequence
  peptide derived from viral capsid protein
MVWQDRDVYLQGPIW

SEQ ID NO: 749 - protein, 15 aa, Artificial Sequence
  peptide derived from viral capsid protein
DKGEPVNAADAAALE

SEQ ID NO: 750 - protein, 15 aa, Artificial Sequence
  peptide derived from viral capsid protein
ERLQEDTSFGGNLGR

SEQ ID NO: 751 - protein, 15 aa, Artificial Sequence
  peptide derived from viral capsid protein
EYQLPYVLGSAHQGC

SEQ ID NO: 752 - protein, 15 aa, Artificial Sequence
  peptide derived from viral capsid protein
FITQYSTGQVSVEIE

SEQ ID NO: 753 - protein, 15 aa, Artificial Sequence
  peptide derived from viral capsid protein
MITDEEEIKATNPVA

SEQ ID NO: 754 - protein, 15 aa, Artificial Sequence
  peptide derived from viral capsid protein
AADAAALEHDKAYDQ

SEQ ID NO: 755 - protein, 15 aa, Artificial Sequence
  peptide derived from viral capsid protein
AVGPTTMASGGGAPM

SEQ ID NO: 756 - protein, 15 aa, Artificial Sequence
  peptide derived from viral capsid protein
DSTWLGDRVITTSTR

SEQ ID NO: 757 - protein, 15 aa, Artificial Sequence
  peptide derived from viral capsid protein
ATPAAVGPTTMASGG

SEQ ID NO: 758 - protein, 15 aa, Artificial Sequence
  peptide derived from viral capsid protein
DNNEGADGVGNASGN

SEQ ID NO: 759 - protein, 15 aa, Artificial Sequence
  peptide derived from viral capsid protein
EQSPQEPDSSSGIGK

SEQ ID NO: 760 - protein, 15 aa, Artificial Sequence
  peptide derived from viral capsid protein
FNIQVKEVTTNDGVT

SEQ ID NO: 761 - protein, 15 aa, Artificial Sequence
  peptide derived from viral capsid protein
PAAVGPTTMASGGGA

SEQ ID NO: 762 - protein, 15 aa, Artificial Sequence
  peptide derived from viral capsid protein
SSYAHSQSLDRLMNP

SEQ ID NO: 763 - protein, 15 aa, Artificial Sequence
  peptide derived from viral capsid protein
TAPGKKRPVEQSPQE

SEQ ID NO: 764 - protein, 15 aa, Artificial Sequence
  peptide derived from viral capsid protein
FHSSYAHSQSLDRLM

SEQ ID NO: 765 - protein, 15 aa, Artificial Sequence
  peptide derived from viral capsid protein
FNGLDKGEPVNAADA

SEQ ID NO: 766 - protein, 15 aa, Artificial Sequence
  peptide derived from viral capsid protein
HSSYAHSQSLDRLMN

SEQ ID NO: 767 - protein, 15 aa, Artificial Sequence
  peptide derived from viral capsid protein
TTSTRTWALPTYNNH

SEQ ID NO: 768 - protein, 15 aa, Artificial Sequence
  peptide derived from viral capsid protein
VKEVTTNDGVTTIAN

SEQ ID NO: 769 - protein, 15 aa, Artificial Sequence
  peptide derived from viral capsid protein
DGVGNSSGNWHCDSQ

SEQ ID NO: 770 - protein, 15 aa, Artificial Sequence
  peptide derived from viral capsid protein
NSSGNWHCDSQWLGD

SEQ ID NO: 771 - protein, 15 aa, Artificial Sequence
  peptide derived from viral capsid protein
AKKRILEPLGLVEEA

SEQ ID NO: 772 - protein, 15 aa, Artificial Sequence
  peptide derived from viral capsid protein
PVPANPPTTFSPAKF

SEQ ID NO: 773 - protein, 15 aa, Artificial Sequence
  peptide derived from viral capsid protein
NNSNFPWTAASKYHL

SEQ ID NO: 774 - protein, 15 aa, Artificial Sequence
  peptide derived from viral capsid protein
PDSSSGVGKSGKQPA

SEQ ID NO: 775 - protein, 15 aa, Artificial Sequence
  peptide derived from viral capsid protein
QSSNTAPTTRTVNDQ

SEQ ID NO: 776 - protein, 15 aa, Artificial Sequence
  peptide derived from viral capsid protein
TVANNLQSSNTAPTT

SEQ ID NO: 777 - protein, 15 aa, Artificial Sequence
  peptide derived from viral capsid protein
AELDNVMITDEEEIR

SEQ ID NO: 778 - protein, 15 aa, Artificial Sequence
  peptide derived from viral capsid protein
EEKFFPMHGNLIFGK

SEQ ID NO: 779 - protein, 15 aa, Artificial Sequence
  peptide derived from viral capsid protein
GNNFQFSYEFENVPF

SEQ ID NO: 780 - protein, 15 aa, Artificial Sequence
  peptide derived from viral capsid protein
NVEFAVNTEGVYSEP

SEQ ID NO: 781 - protein, 15 aa, Artificial Sequence
  peptide derived from viral capsid protein
MLRTGNNFQFSYEFE

SEQ ID NO: 782 - protein, 15 aa, Artificial Sequence
  peptide derived from viral capsid protein
RTGNNFQFSYEFENV

SEQ ID NO: 783 - protein, 15 aa, Artificial Sequence
  peptide derived from viral capsid protein
STVQVFTDSDYQLPY

SEQ ID NO: 784 - protein, 15 aa, Artificial Sequence
  peptide derived from viral capsid protein
DGSQAVGRSSFYCLE

SEQ ID NO: 785 - protein, 15 aa, Artificial Sequence
  peptide derived from viral capsid protein
EFAVNTEGVYSEPRP

SEQ ID NO: 786 - protein, 15 aa, Artificial Sequence
  peptide derived from viral capsid protein
EFAWPGASSWALNGR

SEQ ID NO: 787 - protein, 15 aa, Artificial Sequence
  peptide derived from viral capsid protein
DTESVPDPQPIGEPP

SEQ ID NO: 788 - protein, 15 aa, Artificial Sequence
  peptide derived from viral capsid protein
NNNSEFAWPGASSWA

SEQ ID NO: 789 - protein, 15 aa, Artificial Sequence
  peptide derived from viral capsid protein
NTPVPADPPTAFNKD

SEQ ID NO: 790 - protein, 15 aa, Artificial Sequence
  peptide derived from viral capsid protein
STTVTQNNNSEFAWP

SEQ ID NO: 791 - protein, 15 aa, Artificial Sequence
  peptide derived from viral capsid protein
EIQYTSNYYKSNNVE

SEQ ID NO: 792 - protein, 15 aa, Artificial Sequence
  peptide derived from viral capsid protein
ENVPFHSSYAHSQSL

SEQ ID NO: 793 - protein, 15 aa, Artificial Sequence
  peptide derived from viral capsid protein
ILIKNTPVPADPPTA

SEQ ID NO: 794 - protein, 15 aa, Artificial Sequence
  peptide derived from viral capsid protein
RVSTTVTQNNNSEFA

SEQ ID NO: 795 - protein, 15 aa, Artificial Sequence
  peptide derived from viral capsid protein
SDYQLPYVLGSAHEG

SEQ ID NO: 796 - protein, 15 aa, Artificial Sequence
  peptide derived from viral capsid protein
GNGLDKGEPVNAADA

SEQ ID NO: 797 - protein, 15 aa, Artificial Sequence
  peptide derived from viral capsid protein
KSNNVEFAVNTEGVY

SEQ ID NO: 798 - protein, 15 aa, Artificial Sequence
  peptide derived from viral capsid protein
LNSFITQYSTGQVSV

SEQ ID NO: 799 - protein, 15 aa, Artificial Sequence
  peptide derived from viral capsid protein
QQTLKFSVAGPSNMA

SEQ ID NO: 800 - protein, 15 aa, Artificial Sequence
  peptide derived from viral capsid protein
SSGNWHCDSQWLGDR

SEQ ID NO: 801 - protein, 15 aa, Artificial Sequence
  peptide derived from viral capsid protein
ADNNEGADGVGSSSG

SEQ ID NO: 802 - protein, 15 aa, Artificial Sequence
  peptide derived from viral capsid protein
ASGGGAPVADNNEGA

SEQ ID NO: 803 - protein, 15 aa, Artificial Sequence
  peptide derived from viral capsid protein
IGEPPAAPSGVGSLT

SEQ ID NO: 804 - protein, 15 aa, Artificial Sequence
  peptide derived from viral capsid protein
PLGLVEEAAKTAPGK

SEQ ID NO: 805 - protein, 15 aa, Artificial Sequence
  peptide derived from viral capsid protein
SAGIGKSGAQPAKKR

SEQ ID NO: 806 - protein, 15 aa, Artificial Sequence
  peptide derived from viral capsid protein
ENSKRWNPEIQYTSN

SEQ ID NO: 807 - protein, 15 aa, Artificial Sequence
  peptide derived from viral capsid protein
ELQKENSKRWNPEIQ

SEQ ID NO: 808 - protein, 15 aa, Artificial Sequence
  peptide derived from viral capsid protein
GNNFQFTYTFEDVPF

SEQ ID NO: 809 - protein, 15 aa, Artificial Sequence
  peptide derived from viral capsid protein
EERFFPSNGILIFGK

SEQ ID NO: 810 - protein, 15 aa, Artificial Sequence
  peptide derived from viral capsid protein
PVATEEYGIVADNLQ

SEQ ID NO: 811 - protein, 15 aa, Artificial Sequence
  peptide derived from viral capsid protein
QFTYTFEDVPFHSSY

SEQ ID NO: 812 - protein, 15 aa, Artificial Sequence
  peptide derived from viral capsid protein
NTPVPADPPTTFNQS

SEQ ID NO: 813 - protein, 15 aa, Artificial Sequence
  peptide derived from viral capsid protein
EIKTTNPVATEEYGI

SEQ ID NO: 814 - protein, 15 aa, Artificial Sequence
  peptide derived from viral capsid protein
GSSSGNWHCDSTWLG

SEQ ID NO: 815 - protein, 15 aa, Artificial Sequence
  peptide derived from viral capsid protein
RTGNNFQFTYTFEDV

SEQ ID NO: 816 - protein, 15 aa, Artificial Sequence
  peptide derived from viral capsid protein
TNPVATEEYGIVADN

SEQ ID NO: 817 - protein, 15 aa, Artificial Sequence
  peptide derived from viral capsid protein
TSEEEIKTTNPVATE

SEQ ID NO: 818 - protein, 15 aa, Artificial Sequence
  peptide derived from viral capsid protein
GPCYRQQRVSTTTGQ

SEQ ID NO: 819 - protein, 15 aa, Artificial Sequence
  peptide derived from viral capsid protein
LPGPCYRQQRVSTTT

SEQ ID NO: 820 - protein, 15 aa, Artificial Sequence
  peptide derived from viral capsid protein
TTGGTANTQTLGFSQ

SEQ ID NO: 821 - protein, 15 aa, Artificial Sequence
  peptide derived from viral capsid protein
KQISNGTSGGATNDN

SEQ ID NO: 822 - protein, 15 aa, Artificial Sequence
  peptide derived from viral capsid protein
KQNAARDNADYSDVM

SEQ ID NO: 823 - protein, 15 aa, Artificial Sequence
  peptide derived from viral capsid protein
NAARDNADYSDVMLT

SEQ ID NO: 824 - protein, 15 aa, Artificial Sequence
  peptide derived from viral capsid protein
SKLNSFITQYSTGQV

SEQ ID NO: 825 - protein, 15 aa, Artificial Sequence
  peptide derived from viral capsid protein
VKEVTQNEGTKTIAN

SEQ ID NO: 826 - protein, 15 aa, Artificial Sequence
  peptide derived from viral capsid protein
VNSQGALPGMVWQNR

SEQ ID NO: 827 - protein, 15 aa, Artificial Sequence
  peptide derived from viral capsid protein
NNSNFAWTAGTKYHL

SEQ ID NO: 828 - protein, 15 aa, Artificial Sequence
  peptide derived from viral capsid protein
QQQNTAPQIGTVNSQ

SEQ ID NO: 829 - protein, 15 aa, Artificial Sequence
  peptide derived from viral capsid protein
YNNHLYKQISNGTSG

SEQ ID NO: 830 - protein, 15 aa, Artificial Sequence
  peptide derived from viral capsid protein
YSDVMLTSEEEIKTT

SEQ ID NO: 831 - protein, 15 aa, Artificial Sequence
  peptide derived from viral capsid protein
DNTYFGYSTPWGYFD

SEQ ID NO: 832 - protein, 15 aa, Artificial Sequence
  peptide derived from viral capsid protein
TYFGYSTPWGYFDFN

SEQ ID NO: 833 - protein, 15 aa, Artificial Sequence
  peptide derived from viral capsid protein
ESVPDPQPLGEPPAA

SEQ ID NO: 834 - protein, 15 aa, Artificial Sequence
  peptide derived from viral capsid protein
STGIGKKGQQPARKR

SEQ ID NO: 835 - protein, 15 aa, Artificial Sequence
  peptide derived from viral capsid protein
FGYSTPWGYFDFNRF

SEQ ID NO: 836 - protein, 15 aa, Artificial Sequence
  peptide derived from viral capsid protein
YFGYSTPWGYFDFNR

SEQ ID NO: 837 - protein, 15 aa, Artificial Sequence
  peptide derived from viral capsid protein
NAYFGYSTPWGYFDF

SEQ ID NO: 838 - protein, 15 aa, Artificial Sequence
  peptide derived from viral capsid protein
HPPDWLEEVGEGLRE

SEQ ID NO: 839 - protein, 15 aa, Artificial Sequence
  peptide derived from viral capsid protein
TENPTERSSFFCLEY

SEQ ID NO: 840 - protein, 15 aa, Artificial Sequence
  peptide derived from viral capsid protein
WLEEVGEGLREFLGL

SEQ ID NO: 841 - protein, 15 aa, Artificial Sequence
  peptide derived from viral capsid protein
YSTGQVTVEMEWELK

SEQ ID NO: 842 - protein, 15 aa, Artificial Sequence
  peptide derived from viral capsid protein
FVDFAPDSTGEYRTT

SEQ ID NO: 843 - protein, 15 aa, Artificial Sequence
  peptide derived from viral capsid protein
QEIVPGSVWMERDVY

SEQ ID NO: 844 - protein, 15 aa, Artificial Sequence
  peptide derived from viral capsid protein
TPWGYFDFNRFHSHW

SEQ ID NO: 845 - protein, 15 aa, Artificial Sequence
  peptide derived from viral capsid protein
ANAYFGYSTPWGYFD

SEQ ID NO: 846 - protein, 15 aa, Artificial Sequence
  peptide derived from viral capsid protein
DDDYQLPYVVGNGTE

SEQ ID NO: 847 - protein, 15 aa, Artificial Sequence
  peptide derived from viral capsid protein
DEVAREHDISYNEQL

SEQ ID NO: 848 - protein, 15 aa, Artificial Sequence
  peptide derived from viral capsid protein
ELKKENSKRWNPEIQ

SEQ ID NO: 849 - protein, 15 aa, Artificial Sequence
  peptide derived from viral capsid protein
GNASGDWHCDSTWMG

SEQ ID NO: 850 - protein, 15 aa, Artificial Sequence
  peptide derived from viral capsid protein
GYNYLGPGNGLDRGE

SEQ ID NO: 851 - protein, 15 aa, Artificial Sequence
  peptide derived from viral capsid protein
TSFSDVPVSSFITQY

SEQ ID NO: 852 - protein, 15 aa, Artificial Sequence
  peptide derived from viral capsid protein
ANNLTSTVQVFTDDD

SEQ ID NO: 853 - protein, 15 aa, Artificial Sequence
  peptide derived from viral capsid protein
DQYLYRFVSTNNTGG

SEQ ID NO: 854 - protein, 15 aa, Artificial Sequence
  peptide derived from viral capsid protein
EYRTTRPIGTRYLTR

SEQ ID NO: 855 - protein, 15 aa, Artificial Sequence
  peptide derived from viral capsid protein
IFNIQVKEVTVQDST

SEQ ID NO: 856 - protein, 15 aa, Artificial Sequence
  peptide derived from viral capsid protein
ENSKRWNPEIQYTNN

SEQ ID NO: 857 - protein, 15 aa, Artificial Sequence
  peptide derived from viral capsid protein
AGPPKPKPNQQHQDQ

SEQ ID NO: 858 - protein, 15 aa, Artificial Sequence
  peptide derived from viral capsid protein
PSTSSDAEAGPSGSQ

SEQ ID NO: 859 - protein, 15 aa, Artificial Sequence
  peptide derived from viral capsid protein
TGQVTVEMEWELKKE

SEQ ID NO: 860 - protein, 15 aa, Artificial Sequence
  peptide derived from viral capsid protein
VKIFNIQVKEVTVQD

SEQ ID NO: 861 - protein, 15 aa, Artificial Sequence
  peptide derived from viral capsid protein
DSTTTIANNLTSTVQ

SEQ ID NO: 862 - protein, 15 aa, Artificial Sequence
  peptide derived from viral capsid protein
ISYNEQLEAGDNPYL

SEQ ID NO: 863 - protein, 15 aa, Artificial Sequence
  peptide derived from viral capsid protein
LGLEAGPPKPKPNQQ

SEQ ID NO: 864 - protein, 15 aa, Artificial Sequence
  peptide derived from viral capsid protein
TAPATGTYNLQEIVP

SEQ ID NO: 865 - protein, 15 aa, Artificial Sequence
  peptide derived from viral capsid protein
TMSAGGGGPLGDNNQ

SEQ ID NO: 866 - protein, 15 aa, Artificial Sequence
  peptide derived from viral capsid protein
FSYQFEDVPFHSSYA

SEQ ID NO: 867 - protein, 15 aa, Artificial Sequence
  peptide derived from viral capsid protein
VLMFGKQGAGKDNVD

SEQ ID NO: 868 - protein, 15 aa, Artificial Sequence
  peptide derived from viral capsid protein
DFAVNTDGTYSEPRP

SEQ ID NO: 869 - protein, 15 aa, Artificial Sequence
  peptide derived from viral capsid protein
DGTYSEPRPIGTRYL

SEQ ID NO: 870 - protein, 15 aa, Artificial Sequence
  peptide derived from viral capsid protein
GAVNSQGALPGMVWQ

SEQ ID NO: 871 - protein, 15 aa, Artificial Sequence
  peptide derived from viral capsid protein
QMLRTGNNFEFSYQF

SEQ ID NO: 872 - protein, 15 aa, Artificial Sequence
  peptide derived from viral capsid protein
MFGKQGAGKDNVDYS

SEQ ID NO: 873 - protein, 15 aa, Artificial Sequence
  peptide derived from viral capsid protein
APIVGAVNSQGALPG

SEQ ID NO: 874 - protein, 15 aa, Artificial Sequence
  peptide derived from viral capsid protein
IVGAVNSQGALPGMV

SEQ ID NO: 875 - protein, 15 aa, Artificial Sequence
  peptide derived from viral capsid protein
LQQQNAAPIVGAVNS

SEQ ID NO: 876 - protein, 15 aa, Artificial Sequence
  peptide derived from viral capsid protein
NTDGTYSEPRPIGTR

SEQ ID NO: 877 - protein, 15 aa, Artificial Sequence
  peptide derived from viral capsid protein
STNVDFAVNTDGTYS

SEQ ID NO: 878 - protein, 15 aa, Artificial Sequence
  peptide derived from viral capsid protein
KDDEERFFPSSGVLM

SEQ ID NO: 879 - protein, 15 aa, Artificial Sequence
  peptide derived from viral capsid protein
THKDDEERFFPSSGV

SEQ ID NO: 880 - protein, 15 aa, Artificial Sequence
  peptide derived from viral capsid protein
VNPGVAMATHKDDEE

SEQ ID NO: 881 - protein, 15 aa, Artificial Sequence
  peptide derived from viral capsid protein
KNTPVPADPPTTFSQ

SEQ ID NO: 882 - protein, 15 aa, Artificial Sequence
  peptide derived from viral capsid protein
MATHKDDEERFFPSS

SEQ ID NO: 883 - protein, 15 aa, Artificial Sequence
  peptide derived from viral capsid protein
NPVATEQYGVVADNL

SEQ ID NO: 884 - protein, 15 aa, Artificial Sequence
  peptide derived from viral capsid protein
PGVAMATHKDDEERF

SEQ ID NO: 885 - protein, 15 aa, Artificial Sequence
  peptide derived from viral capsid protein
RDSLVNPGVAMATHK

SEQ ID NO: 886 - protein, 15 aa, Artificial Sequence
  peptide derived from viral capsid protein
TTNPVATEQYGVVAD

SEQ ID NO: 887 - protein, 15 aa, Artificial Sequence
  peptide derived from viral capsid protein
VPADPPTTFSQAKLA

SEQ ID NO: 888 - protein, 15 aa, Artificial Sequence
  peptide derived from viral capsid protein
YFPSQMLRTGNNFEF

SEQ ID NO: 889 - protein, 15 aa, Artificial Sequence
  peptide derived from viral capsid protein
PSQMLRTGNNFEFSY

SEQ ID NO: 890 - protein, 15 aa, Artificial Sequence
  peptide derived from viral capsid protein
VLMFGKQGAGDNVDY

SEQ ID NO: 891 - protein, 15 aa, Artificial Sequence
  peptide derived from viral capsid protein
AGDNPYLRYHADAEF

SEQ ID NO: 892 - protein, 15 aa, Artificial Sequence
  peptide derived from viral capsid protein
AGDNVDYSSVMLTSE

SEQ ID NO: 893 - protein, 15 aa, Artificial Sequence
  peptide derived from viral capsid protein
FPSQMLRTGNFEFSY

SEQ ID NO: 894 - protein, 15 aa, Artificial Sequence
  peptide derived from viral capsid protein
IVGAVSQGALPGMVW

SEQ ID NO: 895 - protein, 15 aa, Artificial Sequence
  peptide derived from viral capsid protein
NWGFRPKRLNFLFNI

SEQ ID NO: 896 - protein, 15 aa, Artificial Sequence
  peptide derived from viral capsid protein
PVATEQYGWADNLQQ

SEQ ID NO: 897 - protein, 15 aa, Artificial Sequence
  peptide derived from viral capsid protein
EQYGWADNLQQQNAA

SEQ ID NO: 898 - protein, 15 aa, Artificial Sequence
  peptide derived from viral capsid protein
GPFNGLDKGEPVAAD

SEQ ID NO: 899 - protein, 15 aa, Artificial Sequence
  peptide derived from viral capsid protein
LVNPGVAMATHDDEE

SEQ ID NO: 900 - protein, 15 aa, Artificial Sequence
  peptide derived from viral capsid protein
LYYLSRTQSTGGTAG

SEQ ID NO: 901 - protein, 15 aa, Artificial Sequence
  peptide derived from viral capsid protein
NNMSAQAKNWLPGPC

SEQ ID NO: 902 - protein, 15 aa, Artificial Sequence
  peptide derived from viral capsid protein
YLGPFNGLDKGEPVA

SEQ ID NO: 903 - protein, 15 aa, Artificial Sequence
  peptide derived from viral capsid protein
ATEQYGWADNLQQQN

SEQ ID NO: 904 - protein, 15 aa, Artificial Sequence
  peptide derived from viral capsid protein
ATHDDEERFFPSSGV

SEQ ID NO: 905 - protein, 15 aa, Artificial Sequence
  peptide derived from viral capsid protein
CLEYFPSQMLRTGNF

SEQ ID NO: 906 - protein, 15 aa, Artificial Sequence
  peptide derived from viral capsid protein
DKGEPVAADAAALEH

SEQ ID NO: 907 - protein, 15 aa, Artificial Sequence
  peptide derived from viral capsid protein
FLFNIQVKEVTQNEG

SEQ ID NO: 908 - protein, 15 aa, Artificial Sequence
  peptide derived from viral capsid protein
GEPVAADAAALEHDK

SEQ ID NO: 909 - protein, 15 aa, Artificial Sequence
  peptide derived from viral capsid protein
LRYHADAEFQERLQE

SEQ ID NO: 910 - protein, 15 aa, Artificial Sequence
  peptide derived from viral capsid protein
NPGVAMATHDDEERF

SEQ ID NO: 911 - protein, 15 aa, Artificial Sequence
  peptide derived from viral capsid protein
PVAADAAALEHDKAY

SEQ ID NO: 912 - protein, 15 aa, Artificial Sequence
  peptide derived from viral capsid protein
QTGDSESVPDPQPIG

SEQ ID NO: 913 - protein, 15 aa, Artificial Sequence
  peptide derived from viral capsid protein
YHADAEFQERLQEDT

SEQ ID NO: 914 - protein, 15 aa, Artificial Sequence
  peptide derived from viral capsid protein
DPPTTFNQAKLASFI

SEQ ID NO: 915 - protein, 15 aa, Artificial Sequence
  peptide derived from viral capsid protein
GFRPKRLNFLFNIQV

SEQ ID NO: 916 - protein, 15 aa, Artificial Sequence
  peptide derived from viral capsid protein
GPNNMSAQAKNWLPG

SEQ ID NO: 917 - protein, 15 aa, Artificial Sequence
  peptide derived from viral capsid protein
GVAMATHDDEERFFP

SEQ ID NO: 918 - protein, 15 aa, Artificial Sequence
  peptide derived from viral capsid protein
KTTNPVATEQYGWAD

SEQ ID NO: 919 - protein, 15 aa, Artificial Sequence
  peptide derived from viral capsid protein
LEPLGLVESPVKTAP

SEQ ID NO: 920 - protein, 15 aa, Artificial Sequence
  peptide derived from viral capsid protein
LNFLFNIQVKEVTQN

SEQ ID NO: 921 - protein, 15 aa, Artificial Sequence
  peptide derived from viral capsid protein
NNNWGFRPKRLNFLF

SEQ ID NO: 922 - protein, 15 aa, Artificial Sequence
  peptide derived from viral capsid protein
PSSGVLMFGKQGAGD

SEQ ID NO: 923 - protein, 15 aa, Artificial Sequence
  peptide derived from viral capsid protein
PYLRYHADAEFQERL

SEQ ID NO: 924 - protein, 15 aa, Artificial Sequence
  peptide derived from viral capsid protein
RVLEPLGLVESPVKT

SEQ ID NO: 925 - protein, 15 aa, Artificial Sequence
  peptide derived from viral capsid protein
SPVKTAPGKKRPVEP

SEQ ID NO: 926 - protein, 15 aa, Artificial Sequence
  peptide derived from viral capsid protein
SQAGPNNMSAQAKNW

SEQ ID NO: 927 - protein, 15 aa, Artificial Sequence
  peptide derived from viral capsid protein
STGGTAGTQQLLFSQ

SEQ ID NO: 928 - protein, 15 aa, Artificial Sequence
  peptide derived from viral capsid protein
TGGTAGTQQLLFSQA

SEQ ID NO: 929 - protein, 15 aa, Artificial Sequence
  peptide derived from viral capsid protein
TNPVATEQYGWADNL

SEQ ID NO: 930 - protein, 15 aa, Artificial Sequence
  peptide derived from viral capsid protein
VESPVKTAPGKKRPV

SEQ ID NO: 931 - protein, 15 aa, Artificial Sequence
  peptide derived from viral capsid protein
VKTAPGKKRPVEPSP

SEQ ID NO: 932 - protein, 15 aa, Artificial Sequence
  peptide derived from viral capsid protein
VSQGALPGMVWQNRD

SEQ ID NO: 933 - protein, 15 aa, Artificial Sequence
  peptide derived from viral capsid protein
YLSRTQSTGGTAGTQ

SEQ ID NO: 934 - protein, 15 aa, Artificial Sequence
  peptide derived from viral capsid protein
YYLSRTQSTGGTAGT

SEQ ID NO: 935 - protein, 15 aa, Artificial Sequence
  peptide derived from viral capsid protein
NMSAQAKNWLPGPCY

SEQ ID NO: 936 - protein, 15 aa, Artificial Sequence
  peptide derived from viral capsid protein
GEPPAGPSGLGSGTM

SEQ ID NO: 937 - protein, 15 aa, Artificial Sequence
  peptide derived from viral capsid protein
SEEEIKTTNPVATEQ

SEQ ID NO: 938 - protein, 15 aa, Artificial Sequence
  peptide derived from viral capsid protein
NVDYSSVMLTSEEEI

SEQ ID NO: 939 - protein, 15 aa, Artificial Sequence
  peptide derived from viral capsid protein
FAVNTEGTYSEPRPI

SEQ ID NO: 940 - protein, 15 aa, Artificial Sequence
  peptide derived from viral capsid protein
SNYYKSTNVDFAVNT

SEQ ID NO: 941 - protein, 15 aa, Artificial Sequence
  peptide derived from viral capsid protein
TEGTYSEPRPIGTRY

SEQ ID NO: 942 - protein, 15 aa, Artificial Sequence
  peptide derived from viral capsid protein
ERFFPSSGVLMFGKQ

SEQ ID NO: 943 - protein, 15 aa, Artificial Sequence
  peptide derived from viral capsid protein
HLYKQISNGTSGGST

SEQ ID NO: 944 - protein, 15 aa, Artificial Sequence
  peptide derived from viral capsid protein
IGKKGQQPAKKRLNF

SEQ ID NO: 945 - protein, 15 aa, Artificial Sequence
  peptide derived from viral capsid protein
MSAQAKNWLPGPCYR

SEQ ID NO: 946 - protein, 15 aa, Artificial Sequence
  peptide derived from viral capsid protein
PDPQPIGEPPAGPSG

SEQ ID NO: 947 - protein, 15 aa, Artificial Sequence
  peptide derived from viral capsid protein
QYLYYLSRTQSTGGT

SEQ ID NO: 948 - protein, 15 aa, Artificial Sequence
  peptide derived from viral capsid protein
SVMLTSEEEIKTTNP

SEQ ID NO: 949 - protein, 15 aa, Artificial Sequence
  peptide derived from viral capsid protein
TLSQNNNSNFAWTGA

SEQ ID NO: 950 - protein, 15 aa, Artificial Sequence
  peptide derived from viral capsid protein
YYKSTNVDFAVNTEG

SEQ ID NO: 951 - protein, 15 aa, Artificial Sequence
  peptide derived from viral capsid protein
AGPSGLGSGTMAAGG

SEQ ID NO: 952 - protein, 15 aa, Artificial Sequence
  peptide derived from viral capsid protein
AQAKNWLPGPCYRQQ

SEQ ID NO: 953 - protein, 15 aa, Artificial Sequence
  peptide derived from viral capsid protein
CYRQQRVSTTLSQNN

SEQ ID NO: 954 - protein, 15 aa, Artificial Sequence
  peptide derived from viral capsid protein
DQYLYYLSRTQSTGG

SEQ ID NO: 955 - protein, 15 aa, Artificial Sequence
  peptide derived from viral capsid protein
DYSSVMLTSEEEIKT

SEQ ID NO: 956 - protein, 15 aa, Artificial Sequence
  peptide derived from viral capsid protein
GLGSGTMAAGGGAPM

SEQ ID NO: 957 - protein, 15 aa, Artificial Sequence
  peptide derived from viral capsid protein
GRDSLVNPGVAMATH

SEQ ID NO: 958 - protein, 15 aa, Artificial Sequence
  peptide derived from viral capsid protein
IDQYLYYLSRTQSTG

SEQ ID NO: 959 - protein, 15 aa, Artificial Sequence
  peptide derived from viral capsid protein
IQYTSNYYKSTNVDF

SEQ ID NO: 960 - protein, 15 aa, Artificial Sequence
  peptide derived from viral capsid protein
KKGQQPAKKRLNFGQ

SEQ ID NO: 961 - protein, 15 aa, Artificial Sequence
  peptide derived from viral capsid protein
KLASFITQYSTGQVS

SEQ ID NO: 962 - protein, 15 aa, Artificial Sequence
  peptide derived from viral capsid protein
KYHLNGRDSLVNPGV

SEQ ID NO: 963 - protein, 15 aa, Artificial Sequence
  peptide derived from viral capsid protein
LNGRDSLVNPGVAMA

SEQ ID NO: 964 - protein, 15 aa, Artificial Sequence
  peptide derived from viral capsid protein
NPEIQYTSNYYKSTN

SEQ ID NO: 965 - protein, 15 aa, Artificial Sequence
  peptide derived from viral capsid protein
PEIQYTSNYYKSTNV

SEQ ID NO: 966 - protein, 15 aa, Artificial Sequence
  peptide derived from viral capsid protein
PLIDQYLYYLSRTQS

SEQ ID NO: 967 - protein, 15 aa, Artificial Sequence
  peptide derived from viral capsid protein
QAKLASFITQYSTGQ

SEQ ID NO: 968 - protein, 15 aa, Artificial Sequence
  peptide derived from viral capsid protein
QISNGTSGGSTNDNT

SEQ ID NO: 969 - protein, 15 aa, Artificial Sequence
  peptide derived from viral capsid protein
QYTSNYYKSTNVDFA

SEQ ID NO: 970 - protein, 15 aa, Artificial Sequence
  peptide derived from viral capsid protein
RQQRVSTTLSQNNNS

SEQ ID NO: 971 - protein, 15 aa, Artificial Sequence
  peptide derived from viral capsid protein
SNGTSGGSTNDNTYF

SEQ ID NO: 972 - protein, 15 aa, Artificial Sequence
  peptide derived from viral capsid protein
SQNNNSNFAWTGATK

SEQ ID NO: 973 - protein, 15 aa, Artificial Sequence
  peptide derived from viral capsid protein
TGIGKKGQQPAKKRL

SEQ ID NO: 974 - protein, 15 aa, Artificial Sequence
  peptide derived from viral capsid protein
TSNYYKSTNVDFAVN

SEQ ID NO: 975 - protein, 15 aa, Artificial Sequence
  peptide derived from viral capsid protein
TTLSQNNNSNFAWTG

SEQ ID NO: 976 - protein, 15 aa, Artificial Sequence
  peptide derived from viral capsid protein
YKQISNGTSGGSTND

SEQ ID NO: 977 - protein, 15 aa, Artificial Sequence
  peptide derived from viral capsid protein
YRQQRVSTTLSQNNN

SEQ ID NO: 978 - protein, 15 aa, Artificial Sequence
  peptide derived from viral capsid protein
NNSNFAWTGATKYHL

SEQ ID NO: 979 - protein, 15 aa, Artificial Sequence
  peptide derived from viral capsid protein
GSTNDNTYFGYSTPW

SEQ ID NO: 980 - protein, 15 aa, Artificial Sequence
  peptide derived from viral capsid protein
DNGRGLVLPGYKYLG

SEQ ID NO: 981 - protein, 15 aa, Artificial Sequence
  peptide derived from viral capsid protein
NNNSNFAWTGATKYH

SEQ ID NO: 982 - protein, 15 aa, Artificial Sequence
  peptide derived from viral capsid protein
PKPKANQQKQDNGRG

SEQ ID NO: 983 - protein, 15 aa, Artificial Sequence
  peptide derived from viral capsid protein
QQKQDNGRGLVLPGY

SEQ ID NO: 984 - protein, 15 aa, Artificial Sequence
  peptide derived from viral capsid protein
SNFAWTGATKYHLNG

SEQ ID NO: 985 - protein, 15 aa, Artificial Sequence
  peptide derived from viral capsid protein
LAVPFKAQAQTGWVQ

SEQ ID NO: 986 - protein, 15 aa, Artificial Sequence
  peptide derived from viral capsid protein
QTLAVPFKAQAQTGW

SEQ ID NO: 987 - protein, 15 aa, Artificial Sequence
  peptide derived from viral capsid protein
SRTINGSGQNQQTLK

SEQ ID NO: 988 - protein, 15 aa, Artificial Sequence
  peptide derived from viral capsid protein
GETTRPARQAATADV

SEQ ID NO: 989 - protein, 15 aa, Artificial Sequence
  peptide derived from viral capsid protein
ALGETTRPARQAATA

SEQ ID NO: 990 - protein, 15 aa, Artificial Sequence
  peptide derived from viral capsid protein
GSVSTNLQRGNLALG

SEQ ID NO: 991 - protein, 15 aa, Artificial Sequence
  peptide derived from viral capsid protein
QYGSVSTNLQRGNLA

SEQ ID NO: 992 - protein, 15 aa, Artificial Sequence
  peptide derived from viral capsid protein
RPARQAATADVNTQG

SEQ ID NO: 993 - protein, 15 aa, Artificial Sequence
  peptide derived from viral capsid protein
TTRPARQAATADVNT

SEQ ID NO: 994 - protein, 15 aa, Artificial Sequence
  peptide derived from viral capsid protein
DNLQQQNLALGETTR

SEQ ID NO: 995 - protein, 15 aa, Artificial Sequence
  peptide derived from viral capsid protein
GETTRPATAPQIGTV

SEQ ID NO: 996 - protein, 15 aa, Artificial Sequence
  peptide derived from viral capsid protein
GIVADNLQQQNLALG

SEQ ID NO: 997 - protein, 15 aa, Artificial Sequence
  peptide derived from viral capsid protein
VADNLQQQNLALGET

SEQ ID NO: 998 - protein, 15 aa, Artificial Sequence
  peptide derived from viral capsid protein
RPATQAQTGLVHNQG

SEQ ID NO: 999 - protein, 15 aa, Artificial Sequence
  peptide derived from viral capsid protein
VADNLQQLALGETTR

SEQ ID NO: 1000 - protein, 15 aa, Artificial Sequence
  peptide derived from viral capsid protein
GETTRPAANTGPIVG

SEQ ID NO: 1001 - protein, 15 aa, Artificial Sequence
  peptide derived from viral capsid protein
RPAANTGPIVGNVNS

SEQ ID NO: 1002 - protein, 15 aa, Artificial Sequence
  peptide derived from viral capsid protein
TEQYGVVADNLQQLA

SEQ ID NO: 1003 - protein, 15 aa, Artificial Sequence
  peptide derived from viral capsid protein
TTRPAANTGPIVGNV

SEQ ID NO: 1004 - protein, 15 aa, Artificial Sequence
  peptide derived from viral capsid protein
VSSNLQAANLALGET

SEQ ID NO: 1005 - protein, 15 aa, Artificial Sequence
  peptide derived from viral capsid protein
GIVSSNLQAANLALG

SEQ ID NO: 1006 - protein, 15 aa, Artificial Sequence
  peptide derived from viral capsid protein
RPATAAQTQVVNNQG

SEQ ID NO: 1007 - protein, 15 aa, Artificial Sequence
  peptide derived from viral capsid protein
GETTRPASTTAPATG

SEQ ID NO: 1008 - protein, 15 aa, Artificial Sequence
  peptide derived from viral capsid protein
SLALGETTRPASTTA

SEQ ID NO: 1009 - protein, 15 aa, Artificial Sequence
  peptide derived from viral capsid protein
TTRPASTTAPATGTY

SEQ ID NO: 1010 - protein, 15 aa, Artificial Sequence
  peptide derived from viral capsid protein
VGGQMATNNQSLALG

SEQ ID NO: 1011 - protein, 15 aa, Artificial Sequence
  peptide derived from viral capsid protein
EAAKTAPGKKRPVEH

SEQ ID NO: 1012 - protein, 15 aa, Artificial Sequence
  peptide derived from viral capsid protein
APSGVGSLTMAAGGG

SEQ ID NO: 1013 - protein, 15 aa, Artificial Sequence
  peptide derived from viral capsid protein
GGTTNTQTLGFSQGG

SEQ ID NO: 1014 - protein, 15 aa, Artificial Sequence
  peptide derived from viral capsid protein
VGSLTMAAGGGAPMA

SEQ ID NO: 1015 - protein, 15 aa, Artificial Sequence
  peptide derived from viral capsid protein
GADGVGNSSGNWHCD

SEQ ID NO: 1016 - protein, 15 aa, Artificial Sequence
  peptide derived from viral capsid protein
ADAAALEHDKAYDRQ

SEQ ID NO: 1017 - protein, 15 aa, Artificial Sequence
  peptide derived from viral capsid protein
CLPPFPADVFMVPQY

SEQ ID NO: 1018 - protein, 15 aa, Artificial Sequence
  peptide derived from viral capsid protein
DKAYDRQLDSGDNPY

SEQ ID NO: 1019 - protein, 15 aa, Artificial Sequence
  peptide derived from viral capsid protein
EGADGVGNSSGNWHC

SEQ ID NO: 1020 - protein, 15 aa, Artificial Sequence
  peptide derived from viral capsid protein
NNEGADGVGNSSGNW

SEQ ID NO: 1021 - protein, 15 aa, Artificial Sequence
  peptide derived from viral capsid protein
YLPDWLEDTLSEGIR

SEQ ID NO: 1022 - protein, 15 aa, Artificial Sequence
  peptide derived from viral capsid protein
ALEHDKAYDRQLDSG

SEQ ID NO: 1023 - protein, 15 aa, Artificial Sequence
  peptide derived from viral capsid protein
DVNTQGVLPGMVWQD

SEQ ID NO: 1024 - protein, 15 aa, Artificial Sequence
  peptide derived from viral capsid protein
GPAMASHKDDEEKFF

SEQ ID NO: 1025 - protein, 15 aa, Artificial Sequence
  peptide derived from viral capsid protein
LPPFPADVFMVPQYG

SEQ ID NO: 1026 - protein, 15 aa, Artificial Sequence
  peptide derived from viral capsid protein
QRVSKTSADNNNSEY

SEQ ID NO: 1027 - protein, 15 aa, Artificial Sequence
  peptide derived from viral capsid protein
AADGYLPDWLEDTLS

SEQ ID NO: 1028 - protein, 15 aa, Artificial Sequence
  peptide derived from viral capsid protein
SSGNWHCDSTWMGDR

SEQ ID NO: 1029 - protein, 15 aa, Artificial Sequence
  peptide derived from viral capsid protein
FPADVFMVPQYGYLT

SEQ ID NO: 1030 - protein, 15 aa, Artificial Sequence
  peptide derived from viral capsid protein
GPFNGLDKGEPVNEA

SEQ ID NO: 1031 - protein, 15 aa, Artificial Sequence
  peptide derived from viral capsid protein
GVGNSSGNWHCDSTW

SEQ ID NO: 1032 - protein, 15 aa, Artificial Sequence
  peptide derived from viral capsid protein
NNLTSTVQVFTDSEY

SEQ ID NO: 1033 - protein, 15 aa, Artificial Sequence
  peptide derived from viral capsid protein
NPGPAMASHKDDEEK

SEQ ID NO: 1034 - protein, 15 aa, Artificial Sequence
  peptide derived from viral capsid protein
TAPGKKRPVEHSPVE

SEQ ID NO: 1035 - protein, 15 aa, Artificial Sequence
  peptide derived from viral capsid protein
VLPGMVWQDRDVYLQ

SEQ ID NO: 1036 - protein, 15 aa, Artificial Sequence
  peptide derived from viral capsid protein
VSKTSADNNNSEYSW

SEQ ID NO: 1037 - protein, 15 aa, Artificial Sequence
  peptide derived from viral capsid protein
AMASHKDDEEKFFPQ

SEQ ID NO: 1038 - protein, 15 aa, Artificial Sequence
  peptide derived from viral capsid protein
ATEQYGSVSTNLQRG

SEQ ID NO: 1039 - protein, 15 aa, Artificial Sequence
  peptide derived from viral capsid protein
DNNNSEYSWTGATKY

SEQ ID NO: 1040 - protein, 15 aa, Artificial Sequence
  peptide derived from viral capsid protein
DSVPDPQPLGQPPAA

SEQ ID NO: 1041 - protein, 15 aa, Artificial Sequence
  peptide derived from viral capsid protein
EKTNVDIEKVMITDE

SEQ ID NO: 1042 - protein, 15 aa, Artificial Sequence
  peptide derived from viral capsid protein
EVTQNDGTTTIANNL

SEQ ID NO: 1043 - protein, 15 aa, Artificial Sequence
  peptide derived from viral capsid protein
GNWHCDSTWMGDRVI

SEQ ID NO: 1044 - protein, 15 aa, Artificial Sequence
  peptide derived from viral capsid protein
KKRPVEHSPVEPDSS

SEQ ID NO: 1045 - protein, 15 aa, Artificial Sequence
  peptide derived from viral capsid protein
KPGPPPPKPAERHKD

SEQ ID NO: 1046 - protein, 15 aa, Artificial Sequence
  peptide derived from viral capsid protein
KTSADNNNSEYSWTG

SEQ ID NO: 1047 - protein, 15 aa, Artificial Sequence
  peptide derived from viral capsid protein
NEGADGVGNSSGNWH

SEQ ID NO: 1048 - protein, 15 aa, Artificial Sequence
  peptide derived from viral capsid protein
NLTSTVQVFTDSEYQ

SEQ ID NO: 1049 - protein, 15 aa, Artificial Sequence
  peptide derived from viral capsid protein
NTQGVLPGMVWQDRD

SEQ ID NO: 1050 - protein, 15 aa, Artificial Sequence
  peptide derived from viral capsid protein
RLNFGQTGDADSVPD

SEQ ID NO: 1051 - protein, 15 aa, Artificial Sequence
  peptide derived from viral capsid protein
SRLQFSQAGASDIRD

SEQ ID NO: 1052 - protein, 15 aa, Artificial Sequence
  peptide derived from viral capsid protein
TVQVFTDSEYQLPYV

SEQ ID NO: 1053 - protein, 15 aa, Artificial Sequence
  peptide derived from viral capsid protein
VQVFTDSEYQLPYVL

SEQ ID NO: 1054 - protein, 15 aa, Artificial Sequence
  peptide derived from viral capsid protein
WLEDTLSEGIRQWWK

SEQ ID NO: 1055 - protein, 15 aa, Artificial Sequence
  peptide derived from viral capsid protein
YNKSVNVDFTVDTNG

SEQ ID NO: 1056 - protein, 15 aa, Artificial Sequence
  peptide derived from viral capsid protein
ADGVGNSSGNWHCDS

SEQ ID NO: 1057 - protein, 15 aa, Artificial Sequence
  peptide derived from viral capsid protein
ADVFMVPQYGYLTLN

SEQ ID NO: 1058 - protein, 15 aa, Artificial Sequence
  peptide derived from viral capsid protein
ANNLTSTVQVFTDSE

SEQ ID NO: 1059 - protein, 15 aa, Artificial Sequence
  peptide derived from viral capsid protein
APSGLGTNTMATGSG

SEQ ID NO: 1060 - protein, 15 aa, Artificial Sequence
  peptide derived from viral capsid protein
FKLFNIQVKEVTQND

SEQ ID NO: 1061 - protein, 15 aa, Artificial Sequence
  peptide derived from viral capsid protein
GCLPPFPADVFMVPQ

SEQ ID NO: 1062 - protein, 15 aa, Artificial Sequence
  peptide derived from viral capsid protein
GIRQWWKLKPGPPPP

SEQ ID NO: 1063 - protein, 15 aa, Artificial Sequence
  peptide derived from viral capsid protein
GLDKGEPVNEADAAA

SEQ ID NO: 1064 - protein, 15 aa, Artificial Sequence
  peptide derived from viral capsid protein
KKRVLEPLGLVEEPV

SEQ ID NO: 1065 - protein, 15 aa, Artificial Sequence
  peptide derived from viral capsid protein
KQGSEKTNVDIEKVM

SEQ ID NO: 1066 - protein, 15 aa, Artificial Sequence
  peptide derived from viral capsid protein
KVMITDEEEIRTTNP

SEQ ID NO: 1067 - protein, 15 aa, Artificial Sequence
  peptide derived from viral capsid protein
LTSTVQVFTDSEYQL

SEQ ID NO: 1068 - protein, 15 aa, Artificial Sequence
  peptide derived from viral capsid protein
MADNNEGADGVGNSS

SEQ ID NO: 1069 - protein, 15 aa, Artificial Sequence
  peptide derived from viral capsid protein
PARKRLNFGQTGDAD

SEQ ID NO: 1070 - protein, 15 aa, Artificial Sequence
  peptide derived from viral capsid protein
PPPKPAERHKDDSRG

SEQ ID NO: 1071 - protein, 15 aa, Artificial Sequence
  peptide derived from viral capsid protein
SADNNNSEYSWTGAT

SEQ ID NO: 1072 - protein, 15 aa, Artificial Sequence
  peptide derived from viral capsid protein
TLSEGIRQWWKLKPG

SEQ ID NO: 1073 - protein, 15 aa, Artificial Sequence
  peptide derived from viral capsid protein
TNGVYSEPRPIGTRY

SEQ ID NO: 1074 - protein, 15 aa, Artificial Sequence
  peptide derived from viral capsid protein
TNTPSGTTTQSRLQF

SEQ ID NO: 1075 - protein, 15 aa, Artificial Sequence
  peptide derived from viral capsid protein
WMGDRVITTSTRTWA

SEQ ID NO: 1076 - protein, 15 aa, Artificial Sequence
  peptide derived from viral capsid protein
AATADVNTQGVLPGM

SEQ ID NO: 1077 - protein, 15 aa, Artificial Sequence
  peptide derived from viral capsid protein
AYDRQLDSGDNPYLK

SEQ ID NO: 1078 - protein, 15 aa, Artificial Sequence
  peptide derived from viral capsid protein
CDSTWMGDRVITTST

SEQ ID NO: 1079 - protein, 15 aa, Artificial Sequence
  peptide derived from viral capsid protein
DDSRGLVLPGYKYLG

SEQ ID NO: 1080 - protein, 15 aa, Artificial Sequence
  peptide derived from viral capsid protein
DPQPLGQPPAAPSGL

SEQ ID NO: 1081 - protein, 15 aa, Artificial Sequence
  peptide derived from viral capsid protein
EIRTTNPVATEQYGS

SEQ ID NO: 1082 - protein, 15 aa, Artificial Sequence
  peptide derived from viral capsid protein
FGKQGSEKTNVDIEK

SEQ ID NO: 1083 - protein, 15 aa, Artificial Sequence
  peptide derived from viral capsid protein
FTVDTNGVYSEPRPI

SEQ ID NO: 1084 - protein, 15 aa, Artificial Sequence
  peptide derived from viral capsid protein
GASDIRDQSRNWLPG

SEQ ID NO: 1085 - protein, 15 aa, Artificial Sequence
  peptide derived from viral capsid protein
GLVEEPVKTAPGKKR

SEQ ID NO: 1086 - protein, 15 aa, Artificial Sequence
  peptide derived from viral capsid protein
GNRQAATADVNTQGV

SEQ ID NO: 1087 - protein, 15 aa, Artificial Sequence
  peptide derived from viral capsid protein
GQTGDADSVPDPQPL

SEQ ID NO: 1088 - protein, 15 aa, Artificial Sequence
  peptide derived from viral capsid protein
GRDSLVNPGPAMASH

SEQ ID NO: 1089 - protein, 15 aa, Artificial Sequence
  peptide derived from viral capsid protein
GSGAPMADNNEGADG

SEQ ID NO: 1090 - protein, 15 aa, Artificial Sequence
  peptide derived from viral capsid protein
GVLIFGKQGSEKTNV

SEQ ID NO: 1091 - protein, 15 aa, Artificial Sequence
  peptide derived from viral capsid protein
HSPVEPDSSSGTGKA

SEQ ID NO: 1092 - protein, 15 aa, Artificial Sequence
  peptide derived from viral capsid protein
IQVKEVTQNDGTTTI

SEQ ID NO: 1093 - protein, 15 aa, Artificial Sequence
  peptide derived from viral capsid protein
IRDQSRNWLPGPCYR

SEQ ID NO: 1094 - protein, 15 aa, Artificial Sequence
  peptide derived from viral capsid protein
KEVTQNDGTTTIANN

SEQ ID NO: 1095 - protein, 15 aa, Artificial Sequence
  peptide derived from viral capsid protein
KGEPVNEADAAALEH

SEQ ID NO: 1096 - protein, 15 aa, Artificial Sequence
  peptide derived from viral capsid protein
KLFNIQVKEVTQNDG

SEQ ID NO: 1097 - protein, 15 aa, Artificial Sequence
  peptide derived from viral capsid protein
KLKPGPPPPKPAERH

SEQ ID NO: 1098 - protein, 15 aa, Artificial Sequence
  peptide derived from viral capsid protein
LEPLGLVEEPVKTAP

SEQ ID NO: 1099 - protein, 15 aa, Artificial Sequence
  peptide derived from viral capsid protein
LIFGKQGSEKTNVDI

SEQ ID NO: 1100 - protein, 15 aa, Artificial Sequence
  peptide derived from viral capsid protein
LNFKLFNIQVKEVTQ

SEQ ID NO: 1101 - protein, 15 aa, Artificial Sequence
  peptide derived from viral capsid protein
NFGQTGDADSVPDPQ

SEQ ID NO: 1102 - protein, 15 aa, Artificial Sequence
  peptide derived from viral capsid protein
NLQRGNRQAATADVN

SEQ ID NO: 1103 - protein, 15 aa, Artificial Sequence
  peptide derived from viral capsid protein
NTPVPANPSTTFSAA

SEQ ID NO: 1104 - protein, 15 aa, Artificial Sequence
  peptide derived from viral capsid protein
PAAPSGLGTNTMATG

SEQ ID NO: 1105 - protein, 15 aa, Artificial Sequence
  peptide derived from viral capsid protein
PAERHKDDSRGLVLP

SEQ ID NO: 1106 - protein, 15 aa, Artificial Sequence
  peptide derived from viral capsid protein
PGKKRPVEHSPVEPD

SEQ ID NO: 1107 - protein, 15 aa, Artificial Sequence
  peptide derived from viral capsid protein
PLIDQYLYYLSRTNT

SEQ ID NO: 1108 - protein, 15 aa, Artificial Sequence
  peptide derived from viral capsid protein
PMADNNEGADGVGNS

SEQ ID NO: 1109 - protein, 15 aa, Artificial Sequence
  peptide derived from viral capsid protein
PQILIKNTPVPANPS

SEQ ID NO: 1110 - protein, 15 aa, Artificial Sequence
  peptide derived from viral capsid protein
QAGASDIRDQSRNWL

SEQ ID NO: 1111 - protein, 15 aa, Artificial Sequence
  peptide derived from viral capsid protein
QISSQSGASNDNHYF

SEQ ID NO: 1112 - protein, 15 aa, Artificial Sequence
  peptide derived from viral capsid protein
QRGNRQAATADVNTQ

SEQ ID NO: 1113 - protein, 15 aa, Artificial Sequence
  peptide derived from viral capsid protein
QSGVLIFGKQGSEKT

SEQ ID NO: 1114 - protein, 15 aa, Artificial Sequence
  peptide derived from viral capsid protein
RKRLNFGQTGDADSV

SEQ ID NO: 1115 - protein, 15 aa, Artificial Sequence
  peptide derived from viral capsid protein
RQQRVSKTSADNNNS

SEQ ID NO: 1116 - protein, 15 aa, Artificial Sequence
  peptide derived from viral capsid protein
RTTNPVATEQYGSVS

SEQ ID NO: 1117 - protein, 15 aa, Artificial Sequence
  peptide derived from viral capsid protein
RVLEPLGLVEEPVKT

SEQ ID NO: 1118 - protein, 15 aa, Artificial Sequence
  peptide derived from viral capsid protein
SAAKFASFITQYSTG

SEQ ID NO: 1119 - protein, 15 aa, Artificial Sequence
  peptide derived from viral capsid protein
SEYSWTGATKYHLNG

SEQ ID NO: 1120 - protein, 15 aa, Artificial Sequence
  peptide derived from viral capsid protein
SGTTTQSRLQFSQAG

SEQ ID NO: 1121 - protein, 15 aa, Artificial Sequence
  peptide derived from viral capsid protein
SRGLVLPGYKYLGPF

SEQ ID NO: 1122 - protein, 15 aa, Artificial Sequence
  peptide derived from viral capsid protein
SSGTGKAGQQPARKR

SEQ ID NO: 1123 - protein, 15 aa, Artificial Sequence
  peptide derived from viral capsid protein
TFSAAKFASFITQYS

SEQ ID NO: 1124 - protein, 15 aa, Artificial Sequence
  peptide derived from viral capsid protein
TGDADSVPDPQPLGQ

SEQ ID NO: 1125 - protein, 15 aa, Artificial Sequence
  peptide derived from viral capsid protein
TNPVATEQYGSVSTN

SEQ ID NO: 1126 - protein, 15 aa, Artificial Sequence
  peptide derived from viral capsid protein
VFMVPQYGYLTLNNG

SEQ ID NO: 1127 - protein, 15 aa, Artificial Sequence
  peptide derived from viral capsid protein
VNEADAAALEHDKAY

SEQ ID NO: 1128 - protein, 15 aa, Artificial Sequence
  peptide derived from viral capsid protein
VPDPQPLGQPPAAPS

SEQ ID NO: 1129 - protein, 15 aa, Artificial Sequence
  peptide derived from viral capsid protein
WWKLKPGPPPPKPAE

SEQ ID NO: 1130 - protein, 15 aa, Artificial Sequence
  peptide derived from viral capsid protein
GATKYHLNGRDSLVN

SEQ ID NO: 1131 - protein, 15 aa, Artificial Sequence
  peptide derived from viral capsid protein
NFTFSYTFEDVPFHS

SEQ ID NO: 1132 - protein, 15 aa, Artificial Sequence
  peptide derived from viral capsid protein
RTGNNFTFSYTFEDV

SEQ ID NO: 1133 - protein, 15 aa, Artificial Sequence
  peptide derived from viral capsid protein
EPFGLVEEGAKTAPG

SEQ ID NO: 1134 - protein, 15 aa, Artificial Sequence
  peptide derived from viral capsid protein
PVATERFGTVAVNLQ

SEQ ID NO: 1135 - protein, 15 aa, Artificial Sequence
  peptide derived from viral capsid protein
DVHVMGALPGMVWQD

SEQ ID NO: 1136 - protein, 15 aa, Artificial Sequence
  peptide derived from viral capsid protein
ERFGTVAVNLQSSST

SEQ ID NO: 1137 - protein, 15 aa, Artificial Sequence
  peptide derived from viral capsid protein
MGGFGLKHPPPQILI

SEQ ID NO: 1138 - protein, 15 aa, Artificial Sequence
  peptide derived from viral capsid protein
AMASHKDDKDKFFPM

SEQ ID NO: 1139 - protein, 15 aa, Artificial Sequence
  peptide derived from viral capsid protein
DVPFHSSYAHSQSLD

SEQ ID NO: 1140 - protein, 15 aa, Artificial Sequence
  peptide derived from viral capsid protein
FGTVAVNLQSSSTDP

SEQ ID NO: 1141 - protein, 15 aa, Artificial Sequence
  peptide derived from viral capsid protein
FHPSPLMGGFGLKHP

SEQ ID NO: 1142 - protein, 15 aa, Artificial Sequence
  peptide derived from viral capsid protein
GLKHPPPQILIKNTP

SEQ ID NO: 1143 - protein, 15 aa, Artificial Sequence
  peptide derived from viral capsid protein
GRAVFQAKKRVLEPF

SEQ ID NO: 1144 - protein, 15 aa, Artificial Sequence
  peptide derived from viral capsid protein
HPSPLMGGFGLKHPP

SEQ ID NO: 1145 - protein, 15 aa, Artificial Sequence
  peptide derived from viral capsid protein
KDKFFPMSGVMIFGK

SEQ ID NO: 1146 - protein, 15 aa, Artificial Sequence
  peptide derived from viral capsid protein
KHPPPQILIKNTPVP

SEQ ID NO: 1147 - protein, 15 aa, Artificial Sequence
  peptide derived from viral capsid protein
LMGGFGLKHPPPQIL

SEQ ID NO: 1148 - protein, 15 aa, Artificial Sequence
  peptide derived from viral capsid protein
NLQSSSTDPATGDVH

SEQ ID NO: 1149 - protein, 15 aa, Artificial Sequence
  peptide derived from viral capsid protein
PSPLMGGFGLKHPPP

SEQ ID NO: 1150 - protein, 15 aa, Artificial Sequence
  peptide derived from viral capsid protein
TDPATGDVHVMGALP

SEQ ID NO: 1151 - protein, 15 aa, Artificial Sequence
  peptide derived from viral capsid protein
LPPFPADVFMIPQYG

SEQ ID NO: 1152 - protein, 15 aa, Artificial Sequence
  peptide derived from viral capsid protein
FDFNRFHCHFSPRDW

SEQ ID NO: 1153 - protein, 15 aa, Artificial Sequence
  peptide derived from viral capsid protein
PPFPADVFMIPQYGY

SEQ ID NO: 1154 - protein, 15 aa, Artificial Sequence
  peptide derived from viral capsid protein
HYFGYSTPWGYFDFN

SEQ ID NO: 1155 - protein, 15 aa, Artificial Sequence
  peptide derived from viral capsid protein
CLPPFPADVFMIPQY

SEQ ID NO: 1156 - protein, 15 aa, Artificial Sequence
  peptide derived from viral capsid protein
NNLTSTVQVFSDSEY

SEQ ID NO: 1157 - protein, 15 aa, Artificial Sequence
  peptide derived from viral capsid protein
SQAVGRSSFYCLEYF

SEQ ID NO: 1158 - protein, 15 aa, Artificial Sequence
  peptide derived from viral capsid protein
DNLSEGIREWWDLKP

SEQ ID NO: 1159 - protein, 15 aa, Artificial Sequence
  peptide derived from viral capsid protein
LDRLMNPLIDQYLYY

SEQ ID NO: 1160 - protein, 15 aa, Artificial Sequence
  peptide derived from viral capsid protein
PFPADVFMIPQYGYL

SEQ ID NO: 1161 - protein, 15 aa, Artificial Sequence
  peptide derived from viral capsid protein
QAVGRSSFYCLEYFP

SEQ ID NO: 1162 - protein, 15 aa, Artificial Sequence
  peptide derived from viral capsid protein
QGCLPPFPADVFMIP

SEQ ID NO: 1163 - protein, 15 aa, Artificial Sequence
  peptide derived from viral capsid protein
GADGVGNASGNWHCD

SEQ ID NO: 1164 - protein, 15 aa, Artificial Sequence
  peptide derived from viral capsid protein
NLSEGIREWWDLKPG

SEQ ID NO: 1165 - protein, 15 aa, Artificial Sequence
  peptide derived from viral capsid protein
RSSFYCLEYFPSQML

SEQ ID NO: 1166 - protein, 15 aa, Artificial Sequence
  peptide derived from viral capsid protein
TDGHFHPSPLMGGFG

SEQ ID NO: 1167 - protein, 15 aa, Artificial Sequence
  peptide derived from viral capsid protein
VDFTVDNNGLYTEPR

SEQ ID NO: 1168 - protein, 15 aa, Artificial Sequence
  peptide derived from viral capsid protein
AADGYLPDWLEDNLS

SEQ ID NO: 1169 - protein, 15 aa, Artificial Sequence
  peptide derived from viral capsid protein
ANVDFTVDNNGLYTE

SEQ ID NO: 1170 - protein, 15 aa, Artificial Sequence
  peptide derived from viral capsid protein
FPADVFMIPQYGYLT

SEQ ID NO: 1171 - protein, 15 aa, Artificial Sequence
  peptide derived from viral capsid protein
LPDWLEDNLSEGIRE

SEQ ID NO: 1172 - protein, 15 aa, Artificial Sequence
  peptide derived from viral capsid protein
MAADGYLPDWLEDNL

SEQ ID NO: 1173 - protein, 15 aa, Artificial Sequence
  peptide derived from viral capsid protein
SNDNHYFGYSTPWGY

SEQ ID NO: 1174 - protein, 15 aa, Artificial Sequence
  peptide derived from viral capsid protein
VLPGYKYLGPFNGLD

SEQ ID NO: 1175 - protein, 15 aa, Artificial Sequence
  peptide derived from viral capsid protein
WGYFDFNRFHCHFSP

SEQ ID NO: 1176 - protein, 15 aa, Artificial Sequence
  peptide derived from viral capsid protein
EVTTNDGVTTIANNL

SEQ ID NO: 1177 - protein, 15 aa, Artificial Sequence
  peptide derived from viral capsid protein
GNWHCDSTWLGDRVI

SEQ ID NO: 1178 - protein, 15 aa, Artificial Sequence
  peptide derived from viral capsid protein
NDNHYFGYSTPWGYF

SEQ ID NO: 1179 - protein, 15 aa, Artificial Sequence
  peptide derived from viral capsid protein
PAEFSATKFASFITQ

SEQ ID NO: 1180 - protein, 15 aa, Artificial Sequence
  peptide derived from viral capsid protein
PYLRYNHADAEFQER

SEQ ID NO: 1181 - protein, 15 aa, Artificial Sequence
  peptide derived from viral capsid protein
YNHADAEFQERLQED

SEQ ID NO: 1182 - protein, 15 aa, Artificial Sequence
  peptide derived from viral capsid protein
DFNRFHCHFSPRDWQ

SEQ ID NO: 1183 - protein, 15 aa, Artificial Sequence
  peptide derived from viral capsid protein
DNPYLRYNHADAEFQ

SEQ ID NO: 1184 - protein, 15 aa, Artificial Sequence
  peptide derived from viral capsid protein
DRLMNPLIDQYLYYL

SEQ ID NO: 1185 - protein, 15 aa, Artificial Sequence
  peptide derived from viral capsid protein
GRSSFYCLEYFPSQM

SEQ ID NO: 1186 - protein, 15 aa, Artificial Sequence
  peptide derived from viral capsid protein
HQGCLPPFPADVFMI

SEQ ID NO: 1187 - protein, 15 aa, Artificial Sequence
  peptide derived from viral capsid protein
MGALPGMVWQDRDVY

SEQ ID NO: 1188 - protein, 15 aa, Artificial Sequence
  peptide derived from viral capsid protein
PHTDGHFHPSPLMGG

SEQ ID NO: 1189 - protein, 15 aa, Artificial Sequence
  peptide derived from viral capsid protein
QTGDSESVPDPQPLG

SEQ ID NO: 1190 - protein, 15 aa, Artificial Sequence
  peptide derived from viral capsid protein
SVEIEWELQKENSKR

SEQ ID NO: 1191 - protein, 15 aa, Artificial Sequence
  peptide derived from viral capsid protein
VGRSSFYCLEYFPSQ

SEQ ID NO: 1192 - protein, 15 aa, Artificial Sequence
  peptide derived from viral capsid protein
VQVFSDSEYQLPYVL

SEQ ID NO: 1193 - protein, 15 aa, Artificial Sequence
  peptide derived from viral capsid protein
YKYLGPFNGLDKGEP

SEQ ID NO: 1194 - protein, 15 aa, Artificial Sequence
  peptide derived from viral capsid protein
DGVGNASGNWHCDST

SEQ ID NO: 1195 - protein, 15 aa, Artificial Sequence
  peptide derived from viral capsid protein
GDNPYLRYNHADAEF

SEQ ID NO: 1196 - protein, 15 aa, Artificial Sequence
  peptide derived from viral capsid protein
GGGAPMADNNEGADG

SEQ ID NO: 1197 - protein, 15 aa, Artificial Sequence
  peptide derived from viral capsid protein
GQVSVEIEWELQKEN

SEQ ID NO: 1198 - protein, 15 aa, Artificial Sequence
  peptide derived from viral capsid protein
KGEPVNAADAAALEH

SEQ ID NO: 1199 - protein, 15 aa, Artificial Sequence
  peptide derived from viral capsid protein
LGPFNGLDKGEPVNA

SEQ ID NO: 1200 - protein, 15 aa, Artificial Sequence
  peptide derived from viral capsid protein
LTSTVQVFSDSEYQL

SEQ ID NO: 1201 - protein, 15 aa, Artificial Sequence
  peptide derived from viral capsid protein
NASGNWHCDSTWLGD

SEQ ID NO: 1202 - protein, 15 aa, Artificial Sequence
  peptide derived from viral capsid protein
NNGLYTEPRPIGTRY

SEQ ID NO: 1203 - protein, 15 aa, Artificial Sequence
  peptide derived from viral capsid protein
PDPQPLGEPPATPAA

SEQ ID NO: 1204 - protein, 15 aa, Artificial Sequence
  peptide derived from viral capsid protein
QSLDRLMNPLIDQYL

SEQ ID NO: 1205 - protein, 15 aa, Artificial Sequence
  peptide derived from viral capsid protein
SQSLDRLMNPLIDQY

SEQ ID NO: 1206 - protein, 15 aa, Artificial Sequence
  peptide derived from viral capsid protein
VEEGAKTAPGKKRPV

SEQ ID NO: 1207 - protein, 15 aa, Artificial Sequence
  peptide derived from viral capsid protein
ADAEFQERLQEDTSF

SEQ ID NO: 1208 - protein, 15 aa, Artificial Sequence
  peptide derived from viral capsid protein
ADVFMIPQYGYLTLN

SEQ ID NO: 1209 - protein, 15 aa, Artificial Sequence
  peptide derived from viral capsid protein
GMVWQDRDVYLQGPI

SEQ ID NO: 1210 - protein, 15 aa, Artificial Sequence
  peptide derived from viral capsid protein
IDQYLYYLNRTQNQS

SEQ ID NO: 1211 - protein, 15 aa, Artificial Sequence
  peptide derived from viral capsid protein
KLFNIQVKEVTTNDG

SEQ ID NO: 1212 - protein, 15 aa, Artificial Sequence
  peptide derived from viral capsid protein
KRPVEQSPQEPDSSS

SEQ ID NO: 1213 - protein, 15 aa, Artificial Sequence
  peptide derived from viral capsid protein
KTKTDNNNSNFTWTG

SEQ ID NO: 1214 - protein, 15 aa, Artificial Sequence
  peptide derived from viral capsid protein
KYLGPFNGLDKGEPV

SEQ ID NO: 1215 - protein, 15 aa, Artificial Sequence
  peptide derived from viral capsid protein
NAADAAALEHDKAYD

SEQ ID NO: 1216 - protein, 15 aa, Artificial Sequence
  peptide derived from viral capsid protein
NTPVPANPPAEFSAT

SEQ ID NO: 1217 - protein, 15 aa, Artificial Sequence
  peptide derived from viral capsid protein
PVNAADAAALEHDKA

SEQ ID NO: 1218 - protein, 15 aa, Artificial Sequence
  peptide derived from viral capsid protein
PWGYFDFNRFHCHFS

SEQ ID NO: 1219 - protein, 15 aa, Artificial Sequence
  peptide derived from viral capsid protein
QEDTSFGGNLGRAVF

SEQ ID NO: 1220 - protein, 15 aa, Artificial Sequence
  peptide derived from viral capsid protein
SAHQGCLPPFPADVF

SEQ ID NO: 1221 - protein, 15 aa, Artificial Sequence
  peptide derived from viral capsid protein
SGGGAPMADNNEGAD

SEQ ID NO: 1222 - protein, 15 aa, Artificial Sequence
  peptide derived from viral capsid protein
TGQVSVEIEWELQKE

SEQ ID NO: 1223 - protein, 15 aa, Artificial Sequence
  peptide derived from viral capsid protein
VFSDSEYQLPYVLGS

SEQ ID NO: 1224 - protein, 15 aa, Artificial Sequence
  peptide derived from viral capsid protein
VSKTKTDNNNSNFTW

SEQ ID NO: 1225 - protein, 15 aa, Artificial Sequence
  peptide derived from viral capsid protein
VWQDRDVYLQGPIWA

SEQ ID NO: 1226 - protein, 15 aa, Artificial Sequence
  peptide derived from viral capsid protein
YLGPFNGLDKGEPVN

SEQ ID NO: 1227 - protein, 15 aa, Artificial Sequence
  peptide derived from viral capsid protein
AALEHDKAYDQQLKA

SEQ ID NO: 1228 - protein, 15 aa, Artificial Sequence
  peptide derived from viral capsid protein
ADAAALEHDKAYDQQ

SEQ ID NO: 1229 - protein, 15 aa, Artificial Sequence
  peptide derived from viral capsid protein
AEFQERLQEDTSFGG

SEQ ID NO: 1230 - protein, 15 aa, Artificial Sequence
  peptide derived from viral capsid protein
AVGRSSFYCLEYFPS

SEQ ID NO: 1231 - protein, 15 aa, Artificial Sequence
  peptide derived from viral capsid protein
DDGRGLVLPGYKYLG

SEQ ID NO: 1232 - protein, 15 aa, Artificial Sequence
  peptide derived from viral capsid protein
DNNNSNFTWTGASKY

SEQ ID NO: 1233 - protein, 15 aa, Artificial Sequence
  peptide derived from viral capsid protein
ESIINPGTAMASHKD

SEQ ID NO: 1234 - protein, 15 aa, Artificial Sequence
  peptide derived from viral capsid protein
FGQTGDSESVPDPQP

SEQ ID NO: 1235 - protein, 15 aa, Artificial Sequence
  peptide derived from viral capsid protein
FNRFHCHFSPRDWQR

SEQ ID NO: 1236 - protein, 15 aa, Artificial Sequence
  peptide derived from viral capsid protein
FQERLQEDTSFGGNL

SEQ ID NO: 1237 - protein, 15 aa, Artificial Sequence
  peptide derived from viral capsid protein
FRPKRLNFKLFNIQV

SEQ ID NO: 1238 - protein, 15 aa, Artificial Sequence
  peptide derived from viral capsid protein
FSPRDWQRLINNNWG

SEQ ID NO: 1239 - protein, 15 aa, Artificial Sequence
  peptide derived from viral capsid protein
FTVDNNGLYTEPRPI

SEQ ID NO: 1240 - protein, 15 aa, Artificial Sequence
  peptide derived from viral capsid protein
FTWTGASKYNLNGRE

SEQ ID NO: 1241 - protein, 15 aa, Artificial Sequence
  peptide derived from viral capsid protein
GAPKPKANQQKQDDG

SEQ ID NO: 1242 - protein, 15 aa, Artificial Sequence
  peptide derived from viral capsid protein
GAPMADNNEGADGVG

SEQ ID NO: 1243 - protein, 15 aa, Artificial Sequence
  peptide derived from viral capsid protein
GASNTALDNVMITDE

SEQ ID NO: 1244 - protein, 15 aa, Artificial Sequence
  peptide derived from viral capsid protein
GHFHPSPLMGGFGLK

SEQ ID NO: 1245 - protein, 15 aa, Artificial Sequence
  peptide derived from viral capsid protein
GLDKGEPVNAADAAA

SEQ ID NO: 1246 - protein, 15 aa, Artificial Sequence
  peptide derived from viral capsid protein
GRGLVLPGYKYLGPF

SEQ ID NO: 1247 - protein, 15 aa, Artificial Sequence
  peptide derived from viral capsid protein
GYFDFNRFHCHFSPR

SEQ ID NO: 1248 - protein, 15 aa, Artificial Sequence
  peptide derived from viral capsid protein
GYKYLGPFNGLDKGE

SEQ ID NO: 1249 - protein, 15 aa, Artificial Sequence
  peptide derived from viral capsid protein
IEWELQKENSKRWNP

SEQ ID NO: 1250 - protein, 15 aa, Artificial Sequence
  peptide derived from viral capsid protein
IREWWDLKPGAPKPK

SEQ ID NO: 1251 - protein, 15 aa, Artificial Sequence
  peptide derived from viral capsid protein
KIPHTDGHFHPSPLM

SEQ ID NO: 1252 - protein, 15 aa, Artificial Sequence
  peptide derived from viral capsid protein
KKRPVEQSPQEPDSS

SEQ ID NO: 1253 - protein, 15 aa, Artificial Sequence
  peptide derived from viral capsid protein
KQDDGRGLVLPGYKY

SEQ ID NO: 1254 - protein, 15 aa, Artificial Sequence
  peptide derived from viral capsid protein
KTDNNNSNFTWTGAS

SEQ ID NO: 1255 - protein, 15 aa, Artificial Sequence
  peptide derived from viral capsid protein
LDKGEPVNAADAAAL

SEQ ID NO: 1256 - protein, 15 aa, Artificial Sequence
  peptide derived from viral capsid protein
LEHDKAYDQQLKAGD

SEQ ID NO: 1257 - protein, 15 aa, Artificial Sequence
  peptide derived from viral capsid protein
LEYFPSQMLRTGNNF

SEQ ID NO: 1258 - protein, 15 aa, Artificial Sequence
  peptide derived from viral capsid protein
LKPGAPKPKANQQKQ

SEQ ID NO: 1259 - protein, 15 aa, Artificial Sequence
  peptide derived from viral capsid protein
MASGGGAPMADNNEG

SEQ ID NO: 1260 - protein, 15 aa, Artificial Sequence
  peptide derived from viral capsid protein
NEGADGVGNASGNWH

SEQ ID NO: 1261 - protein, 15 aa, Artificial Sequence
  peptide derived from viral capsid protein
NGLDKGEPVNAADAA

SEQ ID NO: 1262 - protein, 15 aa, Artificial Sequence
  peptide derived from viral capsid protein
NGSQAVGRSSFYCLE

SEQ ID NO: 1263 - protein, 15 aa, Artificial Sequence
  peptide derived from viral capsid protein
NNSNFTWTGASKYNL

SEQ ID NO: 1264 - protein, 15 aa, Artificial Sequence
  peptide derived from viral capsid protein
NNWGFRPKRLNFKLF

SEQ ID NO: 1265 - protein, 15 aa, Artificial Sequence
  peptide derived from viral capsid protein
NPYLRYNHADAEFQE

SEQ ID NO: 1266 - protein, 15 aa, Artificial Sequence
  peptide derived from viral capsid protein
NVMITDEEEIKATNP

SEQ ID NO: 1267 - protein, 15 aa, Artificial Sequence
  peptide derived from viral capsid protein
NWGFRPKRLNFKLFN

SEQ ID NO: 1268 - protein, 15 aa, Artificial Sequence
  peptide derived from viral capsid protein
PADVFMIPQYGYLTL

SEQ ID NO: 1269 - protein, 15 aa, Artificial Sequence
  peptide derived from viral capsid protein
PDSSSGIGKTGQQPA

SEQ ID NO: 1270 - protein, 15 aa, Artificial Sequence
  peptide derived from viral capsid protein
PFNGLDKGEPVNAAD

SEQ ID NO: 1271 - protein, 15 aa, Artificial Sequence
  peptide derived from viral capsid protein
PGKKRPVEQSPQEPD

SEQ ID NO: 1272 - protein, 15 aa, Artificial Sequence
  peptide derived from viral capsid protein
PGYKYLGPFNGLDKG

SEQ ID NO: 1273 - protein, 15 aa, Artificial Sequence
  peptide derived from viral capsid protein
PIWAKIPHTDGHFHP

SEQ ID NO: 1274 - protein, 15 aa, Artificial Sequence
  peptide derived from viral capsid protein
PQILIKNTPVPANPP

SEQ ID NO: 1275 - protein, 15 aa, Artificial Sequence
  peptide derived from viral capsid protein
QEPDSSSGIGKTGQQ

SEQ ID NO: 1276 - protein, 15 aa, Artificial Sequence
  peptide derived from viral capsid protein
QISSASTGASNDNHY

SEQ ID NO: 1277 - protein, 15 aa, Artificial Sequence
  peptide derived from viral capsid protein
QQKQDDGRGLVLPGY

SEQ ID NO: 1278 - protein, 15 aa, Artificial Sequence
  peptide derived from viral capsid protein
REWWDLKPGAPKPKA

SEQ ID NO: 1279 - protein, 15 aa, Artificial Sequence
  peptide derived from viral capsid protein
RLMNPLIDQYLYYLN

SEQ ID NO: 1280 - protein, 15 aa, Artificial Sequence
  peptide derived from viral capsid protein
RLNFKLFNIQVKEVT

SEQ ID NO: 1281 - protein, 15 aa, Artificial Sequence
  peptide derived from viral capsid protein
SEYQLPYVLGSAHQG

SEQ ID NO: 1282 - protein, 15 aa, Artificial Sequence
  peptide derived from viral capsid protein
SGNWHCDSTWLGDRV

SEQ ID NO: 1283 - protein, 15 aa, Artificial Sequence
  peptide derived from viral capsid protein
SPRDWQRLINNNWGF

SEQ ID NO: 1284 - protein, 15 aa, Artificial Sequence
  peptide derived from viral capsid protein
STGQVSVEIEWELQK

SEQ ID NO: 1285 - protein, 15 aa, Artificial Sequence
  peptide derived from viral capsid protein
STPWGYFDFNRFHCH

SEQ ID NO: 1286 - protein, 15 aa, Artificial Sequence
  peptide derived from viral capsid protein
TALDNVMITDEEEIK

SEQ ID NO: 1287 - protein, 15 aa, Artificial Sequence
  peptide derived from viral capsid protein
TGDSESVPDPQPLGE

SEQ ID NO: 1288 - protein, 15 aa, Artificial Sequence
  peptide derived from viral capsid protein
VGNASGNWHCDSTWL

SEQ ID NO: 1289 - protein, 15 aa, Artificial Sequence
  peptide derived from viral capsid protein
WAKIPHTDGHFHPSP

SEQ ID NO: 1290 - protein, 15 aa, Artificial Sequence
  peptide derived from viral capsid protein
WELQKENSKRWNPEV

SEQ ID NO: 1291 - protein, 15 aa, Artificial Sequence
  peptide derived from viral capsid protein
YTEPRPIGTRYLTRP

SEQ ID NO: 1292 - protein, 15 aa, Artificial Sequence
  peptide derived from viral capsid protein
AGMSVQPKNWLPGPC

SEQ ID NO: 1293 - protein, 15 aa, Artificial Sequence
  peptide derived from viral capsid protein
AHSQSLDRLMNPLID

SEQ ID NO: 1294 - protein, 15 aa, Artificial Sequence
  peptide derived from viral capsid protein
APGKKRPVEQSPQEP

SEQ ID NO: 1295 - protein, 15 aa, Artificial Sequence
  peptide derived from viral capsid protein
APKPKANQQKQDDGR

SEQ ID NO: 1296 - protein, 15 aa, Artificial Sequence
  peptide derived from viral capsid protein
CDSTWLGDRVITTST

SEQ ID NO: 1297 - protein, 15 aa, Artificial Sequence
  peptide derived from viral capsid protein
CLEYFPSQMLRTGNN

SEQ ID NO: 1298 - protein, 15 aa, Artificial Sequence
  peptide derived from viral capsid protein
DGRGLVLPGYKYLGP

SEQ ID NO: 1299 - protein, 15 aa, Artificial Sequence
  peptide derived from viral capsid protein
DKAYDQQLKAGDNPY

SEQ ID NO: 1300 - protein, 15 aa, Artificial Sequence
  peptide derived from viral capsid protein
DQQLKAGDNPYLRYN

SEQ ID NO: 1301 - protein, 15 aa, Artificial Sequence
  peptide derived from viral capsid protein
DRDVYLQGPIWAKIP

SEQ ID NO: 1302 - protein, 15 aa, Artificial Sequence
  peptide derived from viral capsid protein
FPSQMLRTGNNFTFS

SEQ ID NO: 1303 - protein, 15 aa, Artificial Sequence
  peptide derived from viral capsid protein
GASKYNLNGRESIIN

SEQ ID NO: 1304 - protein, 15 aa, Artificial Sequence
  peptide derived from viral capsid protein
GDRVITTSTRTWALP

SEQ ID NO: 1305 - protein, 15 aa, Artificial Sequence
  peptide derived from viral capsid protein
GFRPKRLNFKLFNIQ

SEQ ID NO: 1306 - protein, 15 aa, Artificial Sequence
  peptide derived from viral capsid protein
GIREWWDLKPGAPKP

SEQ ID NO: 1307 - protein, 15 aa, Artificial Sequence
  peptide derived from viral capsid protein
GLVEEGAKTAPGKKR

SEQ ID NO: 1308 - protein, 15 aa, Artificial Sequence
  peptide derived from viral capsid protein
GLVLPGYKYLGPFNG

SEQ ID NO: 1309 - protein, 15 aa, Artificial Sequence
  peptide derived from viral capsid protein
GLYTEPRPIGTRYLT

SEQ ID NO: 1310 - protein, 15 aa, Artificial Sequence
  peptide derived from viral capsid protein
GNLGRAVFQAKKRVL

SEQ ID NO: 1311 - protein, 15 aa, Artificial Sequence
  peptide derived from viral capsid protein
GQTGDSESVPDPQPL

SEQ ID NO: 1312 - protein, 15 aa, Artificial Sequence
  peptide derived from viral capsid protein
GRESIINPGTAMASH

SEQ ID NO: 1313 - protein, 15 aa, Artificial Sequence
  peptide derived from viral capsid protein
HADAEFQERLQEDTS

SEQ ID NO: 1314 - protein, 15 aa, Artificial Sequence
  peptide derived from viral capsid protein
HFSPRDWQRLINNNW

SEQ ID NO: 1315 - protein, 15 aa, Artificial Sequence
  peptide derived from viral capsid protein
IKNTPVPANPPAEFS

SEQ ID NO: 1316 - protein, 15 aa, Artificial Sequence
  peptide derived from viral capsid protein
KANQQKQDDGRGLVL

SEQ ID NO: 1317 - protein, 15 aa, Artificial Sequence
  peptide derived from viral capsid protein
KPGAPKPKANQQKQD

SEQ ID NO: 1318 - protein, 15 aa, Artificial Sequence
  peptide derived from viral capsid protein
KPKANQQKQDDGRGL

SEQ ID NO: 1319 - protein, 15 aa, Artificial Sequence
  peptide derived from viral capsid protein
KRLNFGQTGDSESVP

SEQ ID NO: 1320 - protein, 15 aa, Artificial Sequence
  peptide derived from viral capsid protein
LDNVMITDEEEIKAT

SEQ ID NO: 1321 - protein, 15 aa, Artificial Sequence
  peptide derived from viral capsid protein
LGRAVFQAKKRVLEP

SEQ ID NO: 1322 - protein, 15 aa, Artificial Sequence
  peptide derived from viral capsid protein
LNFGQTGDSESVPDP

SEQ ID NO: 1323 - protein, 15 aa, Artificial Sequence
  peptide derived from viral capsid protein
LNGRESIINPGTAMA

SEQ ID NO: 1324 - protein, 15 aa, Artificial Sequence
  peptide derived from viral capsid protein
LNNGSQAVGRSSFYC

SEQ ID NO: 1325 - protein, 15 aa, Artificial Sequence
  peptide derived from viral capsid protein
LPGYKYLGPFNGLDK

SEQ ID NO: 1326 - protein, 15 aa, Artificial Sequence
  peptide derived from viral capsid protein
LPTYNNHLYKQISSA

SEQ ID NO: 1327 - protein, 15 aa, Artificial Sequence
  peptide derived from viral capsid protein
LRYNHADAEFQERLQ

SEQ ID NO: 1328 - protein, 15 aa, Artificial Sequence
  peptide derived from viral capsid protein
LVEEGAKTAPGKKRP

SEQ ID NO: 1329 - protein, 15 aa, Artificial Sequence
  peptide derived from viral capsid protein
MLRTGNNFTFSYTFE

SEQ ID NO: 1330 - protein, 15 aa, Artificial Sequence
  peptide derived from viral capsid protein
NFKLFNIQVKEVTTN

SEQ ID NO: 1331 - protein, 15 aa, Artificial Sequence
  peptide derived from viral capsid protein
NHADAEFQERLQEDT

SEQ ID NO: 1332 - protein, 15 aa, Artificial Sequence
  peptide derived from viral capsid protein
NLGRAVFQAKKRVLE

SEQ ID NO: 1333 - protein, 15 aa, Artificial Sequence
  peptide derived from viral capsid protein
PFHSSYAHSQSLDRL

SEQ ID NO: 1334 - protein, 15 aa, Artificial Sequence
  peptide derived from viral capsid protein
PKRLNFKLFNIQVKE

SEQ ID NO: 1335 - protein, 15 aa, Artificial Sequence
  peptide derived from viral capsid protein
PPATPAAVGPTTMAS

SEQ ID NO: 1336 - protein, 15 aa, Artificial Sequence
  peptide derived from viral capsid protein
PPPQILIKNTPVPAN

SEQ ID NO: 1337 - protein, 15 aa, Artificial Sequence
  peptide derived from viral capsid protein
PQYGYLTLNNGSQAV

SEQ ID NO: 1338 - protein, 15 aa, Artificial Sequence
  peptide derived from viral capsid protein
PRDWQRLINNNWGFR

SEQ ID NO: 1339 - protein, 15 aa, Artificial Sequence
  peptide derived from viral capsid protein
PYVLGSAHQGCLPPF

SEQ ID NO: 1340 - protein, 15 aa, Artificial Sequence
  peptide derived from viral capsid protein
QDDGRGLVLPGYKYL

SEQ ID NO: 1341 - protein, 15 aa, Artificial Sequence
  peptide derived from viral capsid protein
QDRDVYLQGPIWAKI

SEQ ID NO: 1342 - protein, 15 aa, Artificial Sequence
  peptide derived from viral capsid protein
QERLQEDTSFGGNLG

SEQ ID NO: 1343 - protein, 15 aa, Artificial Sequence
  peptide derived from viral capsid protein
QRLINNNWGFRPKRL

SEQ ID NO: 1344 - protein, 15 aa, Artificial Sequence
  peptide derived from viral capsid protein
QYLYYLNRTQNQSGS

SEQ ID NO: 1345 - protein, 15 aa, Artificial Sequence
  peptide derived from viral capsid protein
RDVYLQGPIWAKIPH

SEQ ID NO: 1346 - protein, 15 aa, Artificial Sequence
  peptide derived from viral capsid protein
RDWQRLINNNWGFRP

SEQ ID NO: 1347 - protein, 15 aa, Artificial Sequence
  peptide derived from viral capsid protein
RGSPAGMSVQPKNWL

SEQ ID NO: 1348 - protein, 15 aa, Artificial Sequence
  peptide derived from viral capsid protein
RLNFGQTGDSESVPD

SEQ ID NO: 1349 - protein, 15 aa, Artificial Sequence
  peptide derived from viral capsid protein
RLQEDTSFGGNLGRA

SEQ ID NO: 1350 - protein, 15 aa, Artificial Sequence
  peptide derived from viral capsid protein
RQQRVSKTKTDNNNS

SEQ ID NO: 1351 - protein, 15 aa, Artificial Sequence
  peptide derived from viral capsid protein
SEGIREWWDLKPGAP

SEQ ID NO: 1352 - protein, 15 aa, Artificial Sequence
  peptide derived from viral capsid protein
SKYNLNGRESIINPG

SEQ ID NO: 1353 - protein, 15 aa, Artificial Sequence
  peptide derived from viral capsid protein
SNFTWTGASKYNLNG

SEQ ID NO: 1354 - protein, 15 aa, Artificial Sequence
  peptide derived from viral capsid protein
SSFYCLEYFPSQMLR

SEQ ID NO: 1355 - protein, 15 aa, Artificial Sequence
  peptide derived from viral capsid protein
STRTWALPTYNNHLY

SEQ ID NO: 1356 - protein, 15 aa, Artificial Sequence
  peptide derived from viral capsid protein
TNPVATERFGTVAVN

SEQ ID NO: 1357 - protein, 15 aa, Artificial Sequence
  peptide derived from viral capsid protein
TSTRTWALPTYNNHL

SEQ ID NO: 1358 - protein, 15 aa, Artificial Sequence
  peptide derived from viral capsid protein
TTMASGGGAPMADNN

SEQ ID NO: 1359 - protein, 15 aa, Artificial Sequence
  peptide derived from viral capsid protein
TWLGDRVITTSTRTW

SEQ ID NO: 1360 - protein, 15 aa, Artificial Sequence
  peptide derived from viral capsid protein
TYNNHLYKQISSAST

SEQ ID NO: 1361 - protein, 15 aa, Artificial Sequence
  peptide derived from viral capsid protein
VDNNGLYTEPRPIGT

SEQ ID NO: 1362 - protein, 15 aa, Artificial Sequence
  peptide derived from viral capsid protein
VFMIPQYGYLTLNNG

SEQ ID NO: 1363 - protein, 15 aa, Artificial Sequence
  peptide derived from viral capsid protein
VNAADAAALEHDKAY

SEQ ID NO: 1364 - protein, 15 aa, Artificial Sequence
  peptide derived from viral capsid protein
VPFHSSYAHSQSLDR

SEQ ID NO: 1365 - protein, 15 aa, Artificial Sequence
  peptide derived from viral capsid protein
VQYTSNYAKSANVDF

SEQ ID NO: 1366 - protein, 15 aa, Artificial Sequence
  peptide derived from viral capsid protein
WGFRPKRLNFKLFNI

SEQ ID NO: 1367 - protein, 15 aa, Artificial Sequence
  peptide derived from viral capsid protein
WLGDRVITTSTRTWA

SEQ ID NO: 1368 - protein, 15 aa, Artificial Sequence
  peptide derived from viral capsid protein
WQDRDVYLQGPIWAK

SEQ ID NO: 1369 - protein, 15 aa, Artificial Sequence
  peptide derived from viral capsid protein
WQRLINNNWGFRPKR

SEQ ID NO: 1370 - protein, 15 aa, Artificial Sequence
  peptide derived from viral capsid protein
YAKSANVDFTVDNNG

SEQ ID NO: 1371 - protein, 15 aa, Artificial Sequence
  peptide derived from viral capsid protein
YGYLTLNNGSQAVGR

SEQ ID NO: 1372 - protein, 15 aa, Artificial Sequence
  peptide derived from viral capsid protein
YLNRTQNQSGSAQNK

SEQ ID NO: 1373 - protein, 15 aa, Artificial Sequence
  peptide derived from viral capsid protein
YLRYNHADAEFQERL

SEQ ID NO: 1374 - protein, 15 aa, Artificial Sequence
  peptide derived from viral capsid protein
YNLNGRESIINPGTA

SEQ ID NO: 1375 - protein, 15 aa, Artificial Sequence
  peptide derived from viral capsid protein
FQFSYTFEDVPFHSS

SEQ ID NO: 1376 - protein, 15 aa, Artificial Sequence
  peptide derived from viral capsid protein
QGALPGMVWQDRDVY

SEQ ID NO: 1377 - protein, 15 aa, Artificial Sequence
  peptide derived from viral capsid protein
NDQGALPGMVWQDRD

SEQ ID NO: 1378 - protein, 15 aa, Artificial Sequence
  peptide derived from viral capsid protein
EIRTTNPVATEQYGT

SEQ ID NO: 1379 - protein, 15 aa, Artificial Sequence
  peptide derived from viral capsid protein
EQYGTVANNLQSSNT

SEQ ID NO: 1380 - protein, 15 aa, Artificial Sequence
  peptide derived from viral capsid protein
PGNGLDKGEPVNEAD

SEQ ID NO: 1381 - protein, 15 aa, Artificial Sequence
  peptide derived from viral capsid protein
GEPPAAPTSLGSNTM

SEQ ID NO: 1382 - protein, 15 aa, Artificial Sequence
  peptide derived from viral capsid protein
GSNTMASGGGAPMAD

SEQ ID NO: 1383 - protein, 15 aa, Artificial Sequence
  peptide derived from viral capsid protein
NTMASGGGAPMADNN

SEQ ID NO: 1384 - protein, 15 aa, Artificial Sequence
  peptide derived from viral capsid protein
PTTRTVNDQGALPGM

SEQ ID NO: 1385 - protein, 15 aa, Artificial Sequence
  peptide derived from viral capsid protein
LGPGNGLDKGEPVNE

SEQ ID NO: 1386 - protein, 15 aa, Artificial Sequence
  peptide derived from viral capsid protein
PDPQPLGEPPAAPTS

SEQ ID NO: 1387 - protein, 15 aa, Artificial Sequence
  peptide derived from viral capsid protein
PVATEQYGTVANNLQ

SEQ ID NO: 1388 - protein, 15 aa, Artificial Sequence
  peptide derived from viral capsid protein
QSMSLQARNWLPGPC

SEQ ID NO: 1389 - protein, 15 aa, Artificial Sequence
  peptide derived from viral capsid protein
SGVGKSGKQPARKRL

SEQ ID NO: 1390 - protein, 15 aa, Artificial Sequence
  peptide derived from viral capsid protein
TFSPAKFASFITQYS

SEQ ID NO: 1391 - protein, 15 aa, Artificial Sequence
  peptide derived from viral capsid protein
TVNDQGALPGMVWQD

SEQ ID NO: 1392 - protein, 15 aa, Artificial Sequence
  peptide derived from viral capsid protein
VGNSSGNWHCDSQWL

SEQ ID NO: 1393 - protein, 15 aa, Artificial Sequence
  peptide derived from viral capsid protein
EWWALKPGVPQPKAN

SEQ ID NO: 1394 - protein, 15 aa, Artificial Sequence
  peptide derived from viral capsid protein
FPWTAASKYHLNGRD

SEQ ID NO: 1395 - protein, 15 aa, Artificial Sequence
  peptide derived from viral capsid protein
LINNNWGFRPKKLSF

SEQ ID NO: 1396 - protein, 15 aa, Artificial Sequence
  peptide derived from viral capsid protein
MGGFGLKHPPPQIMI

SEQ ID NO: 1397 - protein, 15 aa, Artificial Sequence
  peptide derived from viral capsid protein
NPPTTFSPAKFASFI

SEQ ID NO: 1398 - protein, 15 aa, Artificial Sequence
  peptide derived from viral capsid protein
NWGFRPKKLSFKLFN

SEQ ID NO: 1399 - protein, 15 aa, Artificial Sequence
  peptide derived from viral capsid protein
TNPVATEQYGTVANN

SEQ ID NO: 1400 - protein, 15 aa, Artificial Sequence
  peptide derived from viral capsid protein
AAKTAPGKKRPVDQS

SEQ ID NO: 1401 - protein, 15 aa, Artificial Sequence
  peptide derived from viral capsid protein
AAPTSLGSNTMASGG

SEQ ID NO: 1402 - protein, 15 aa, Artificial Sequence
  peptide derived from viral capsid protein
AASKYHLNGRDSLVN

SEQ ID NO: 1403 - protein, 15 aa, Artificial Sequence
  peptide derived from viral capsid protein
ANNLQSSNTAPTTRT

SEQ ID NO: 1404 - protein, 15 aa, Artificial Sequence
  peptide derived from viral capsid protein
DQSPQEPDSSSGVGK

SEQ ID NO: 1405 - protein, 15 aa, Artificial Sequence
  peptide derived from viral capsid protein
EGIREWWALKPGVPQ

SEQ ID NO: 1406 - protein, 15 aa, Artificial Sequence
  peptide derived from viral capsid protein
GKQPARKRLNFGQTG

SEQ ID NO: 1407 - protein, 15 aa, Artificial Sequence
  peptide derived from viral capsid protein
GPQSMSLQARNWLPG

SEQ ID NO: 1408 - protein, 15 aa, Artificial Sequence
  peptide derived from viral capsid protein
GRAVFQAKKRILEPL

SEQ ID NO: 1409 - protein, 15 aa, Artificial Sequence
  peptide derived from viral capsid protein
IKNTPVPANPPTTFS

SEQ ID NO: 1410 - protein, 15 aa, Artificial Sequence
  peptide derived from viral capsid protein
IREWWALKPGVPQPK

SEQ ID NO: 1411 - protein, 15 aa, Artificial Sequence
  peptide derived from viral capsid protein
KRILEPLGLVEEAAK

SEQ ID NO: 1412 - protein, 15 aa, Artificial Sequence
  peptide derived from viral capsid protein
LKPGVPQPKANQQHQ

SEQ ID NO: 1413 - protein, 15 aa, Artificial Sequence
  peptide derived from viral capsid protein
NLGRAVFQAKKRILE

SEQ ID NO: 1414 - protein, 15 aa, Artificial Sequence
  peptide derived from viral capsid protein
PANPPTTFSPAKFAS

SEQ ID NO: 1415 - protein, 15 aa, Artificial Sequence
  peptide derived from viral capsid protein
PQIMIKNTPVPANPP

SEQ ID NO: 1416 - protein, 15 aa, Artificial Sequence
  peptide derived from viral capsid protein
QEPDSSSGVGKSGKQ

SEQ ID NO: 1417 - protein, 15 aa, Artificial Sequence
  peptide derived from viral capsid protein
SKYHLNGRDSLVNPG

SEQ ID NO: 1418 - protein, 15 aa, Artificial Sequence
  peptide derived from viral capsid protein
SLGSNTMASGGGAPM

SEQ ID NO: 1419 - protein, 15 aa, Artificial Sequence
  peptide derived from viral capsid protein
SNTAPTTRTVNDQGA

SEQ ID NO: 1420 - protein, 15 aa, Artificial Sequence
  peptide derived from viral capsid protein
TAPTTRTVNDQGALP

SEQ ID NO: 1421 - protein, 15 aa, Artificial Sequence
  peptide derived from viral capsid protein
HKDDEEKFFPMHGNL

SEQ ID NO: 1422 - protein, 15 aa, Artificial Sequence
  peptide derived from viral capsid protein
ASHKDDEEKFFPMHG

SEQ ID NO: 1423 - protein, 15 aa, Artificial Sequence
  peptide derived from viral capsid protein
KFFPMHGNLIFGKEG

SEQ ID NO: 1424 - protein, 15 aa, Artificial Sequence
  peptide derived from viral capsid protein
NVMITDEEEIRTTNP

SEQ ID NO: 1425 - protein, 15 aa, Artificial Sequence
  peptide derived from viral capsid protein
AMASHKDDEEKFFPM

SEQ ID NO: 1426 - protein, 15 aa, Artificial Sequence
  peptide derived from viral capsid protein
LDNVMITDEEEIRTT

SEQ ID NO: 1427 - protein, 15 aa, Artificial Sequence
  peptide derived from viral capsid protein
FGKEGTTASNAELDN

SEQ ID NO: 1428 - protein, 15 aa, Artificial Sequence
  peptide derived from viral capsid protein
KTANDNNNSNFPWTA

SEQ ID NO: 1429 - protein, 15 aa, Artificial Sequence
  peptide derived from viral capsid protein
RQQRLSKTANDNNNS

SEQ ID NO: 1430 - protein, 15 aa, Artificial Sequence
  peptide derived from viral capsid protein
DNNNSNFPWTAASKY

SEQ ID NO: 1431 - protein, 15 aa, Artificial Sequence
  peptide derived from viral capsid protein
FPMHGNLIFGKEGTT

SEQ ID NO: 1432 - protein, 15 aa, Artificial Sequence
  peptide derived from viral capsid protein
GNLIFGKEGTTASNA

SEQ ID NO: 1433 - protein, 15 aa, Artificial Sequence
  peptide derived from viral capsid protein
KEGTTASNAELDNVM

SEQ ID NO: 1434 - protein, 15 aa, Artificial Sequence
  peptide derived from viral capsid protein
LSKTANDNNNSNFPW

SEQ ID NO: 1435 - protein, 15 aa, Artificial Sequence
  peptide derived from viral capsid protein
QGTTSGTTNQSRLLF

SEQ ID NO: 1436 - protein, 15 aa, Artificial Sequence
  peptide derived from viral capsid protein
TASNAELDNVMITDE

SEQ ID NO: 1437 - protein, 15 aa, Artificial Sequence
  peptide derived from viral capsid protein
YLYYLNRTQGTTSGT

SEQ ID NO: 1438 - protein, 15 aa, Artificial Sequence
  peptide derived from viral capsid protein
YYLNRTQGTTSGTTN

SEQ ID NO: 1439 - protein, 15 aa, Artificial Sequence
  peptide derived from viral capsid protein
QRLINNNWGFRPKKL

SEQ ID NO: 1440 - protein, 15 aa, Artificial Sequence
  peptide derived from viral capsid protein
DGNFHPSPLMGGFGM

SEQ ID NO: 1441 - protein, 15 aa, Artificial Sequence
  peptide derived from viral capsid protein
GEDRFFPLSGSLIFG

SEQ ID NO: 1442 - protein, 15 aa, Artificial Sequence
  peptide derived from viral capsid protein
LEDNLSEGIREWWAL

SEQ ID NO: 1443 - protein, 15 aa, Artificial Sequence
  peptide derived from viral capsid protein
NDNAYFGYSTPWGYF

SEQ ID NO: 1444 - protein, 15 aa, Artificial Sequence
  peptide derived from viral capsid protein
NFQFSYEFENVPFHS

SEQ ID NO: 1445 - protein, 15 aa, Artificial Sequence
  peptide derived from viral capsid protein
NNLTSTVQVFTDSDY

SEQ ID NO: 1446 - protein, 15 aa, Artificial Sequence
  peptide derived from viral capsid protein
QGILPGMVWQDRDVY

SEQ ID NO: 1447 - protein, 15 aa, Artificial Sequence
  peptide derived from viral capsid protein
EGVYSEPRPIGTRYL

SEQ ID NO: 1448 - protein, 15 aa, Artificial Sequence
  peptide derived from viral capsid protein
GILPGMVWQDRDVYL

SEQ ID NO: 1449 - protein, 15 aa, Artificial Sequence
  peptide derived from viral capsid protein
NSEFAWPGASSWALN

SEQ ID NO: 1450 - protein, 15 aa, Artificial Sequence
  peptide derived from viral capsid protein
PYLKYNHADAEFQER

SEQ ID NO: 1451 - protein, 15 aa, Artificial Sequence
  peptide derived from viral capsid protein
KEGEDRFFPLSGSLI

SEQ ID NO: 1452 - protein, 15 aa, Artificial Sequence
  peptide derived from viral capsid protein
PGPAMASHKEGEDRF

SEQ ID NO: 1453 - protein, 15 aa, Artificial Sequence
  peptide derived from viral capsid protein
QAKKRLLEPLGLVEE

SEQ ID NO: 1454 - protein, 15 aa, Artificial Sequence
  peptide derived from viral capsid protein
QNQGILPGMVWQDRD

SEQ ID NO: 1455 - protein, 15 aa, Artificial Sequence
  peptide derived from viral capsid protein
EGADGVGSSSGNWHC

SEQ ID NO: 1456 - protein, 15 aa, Artificial Sequence
  peptide derived from viral capsid protein
HEGCLPPFPADVFMI

SEQ ID NO: 1457 - protein, 15 aa, Artificial Sequence
  peptide derived from viral capsid protein
LVEEAAKTAPGKKRP

SEQ ID NO: 1458 - protein, 15 aa, Artificial Sequence
  peptide derived from viral capsid protein
NQGILPGMVWQDRDV

SEQ ID NO: 1459 - protein, 15 aa, Artificial Sequence
  peptide derived from viral capsid protein
EVTDNNGVKTIANNL

SEQ ID NO: 1460 - protein, 15 aa, Artificial Sequence
  peptide derived from viral capsid protein
GADGVGSSSGNWHCD

SEQ ID NO: 1461 - protein, 15 aa, Artificial Sequence
  peptide derived from viral capsid protein
LTSTVQVFTDSDYQL

SEQ ID NO: 1462 - protein, 15 aa, Artificial Sequence
  peptide derived from viral capsid protein
NEGADGVGSSSGNWH

SEQ ID NO: 1463 - protein, 15 aa, Artificial Sequence
  peptide derived from viral capsid protein
NPVATESYGQVATNH

SEQ ID NO: 1464 - protein, 15 aa, Artificial Sequence
  peptide derived from viral capsid protein
NVDADKVMITNEEEI

SEQ ID NO: 1465 - protein, 15 aa, Artificial Sequence
  peptide derived from viral capsid protein
PVADNNEGADGVGSS

SEQ ID NO: 1466 - protein, 15 aa, Artificial Sequence
  peptide derived from viral capsid protein
SAHEGCLPPFPADVF

SEQ ID NO: 1467 - protein, 15 aa, Artificial Sequence
  peptide derived from viral capsid protein
TGDTESVPDPQPIGE

SEQ ID NO: 1468 - protein, 15 aa, Artificial Sequence
  peptide derived from viral capsid protein
TMASGGGAPVADNNE

SEQ ID NO: 1469 - protein, 15 aa, Artificial Sequence
  peptide derived from viral capsid protein
VEQSPQEPDSSAGIG

SEQ ID NO: 1470 - protein, 15 aa, Artificial Sequence
  peptide derived from viral capsid protein
VQVFTDSDYQLPYVL

SEQ ID NO: 1471 - protein, 15 aa, Artificial Sequence
  peptide derived from viral capsid protein
EPLGLVEEAAKTAPG

SEQ ID NO: 1472 - protein, 15 aa, Artificial Sequence
  peptide derived from viral capsid protein
EPPAAPSGVGSLTMA

SEQ ID NO: 1473 - protein, 15 aa, Artificial Sequence
  peptide derived from viral capsid protein
FNKDKLNSFITQYST

SEQ ID NO: 1474 - protein, 15 aa, Artificial Sequence
  peptide derived from viral capsid protein
GAPVADNNEGADGVG

SEQ ID NO: 1475 - protein, 15 aa, Artificial Sequence
  peptide derived from viral capsid protein
GGGAPVADNNEGADG

SEQ ID NO: 1476 - protein, 15 aa, Artificial Sequence
  peptide derived from viral capsid protein
IFGKQGTGRDNVDAD

SEQ ID NO: 1477 - protein, 15 aa, Artificial Sequence
  peptide derived from viral capsid protein
ILPGMVWQDRDVYLQ

SEQ ID NO: 1478 - protein, 15 aa, Artificial Sequence
  peptide derived from viral capsid protein
MGGFGMKHPPPQILI

SEQ ID NO: 1479 - protein, 15 aa, Artificial Sequence
  peptide derived from viral capsid protein
PPQILIKNTPVPADP

SEQ ID NO: 1480 - protein, 15 aa, Artificial Sequence
  peptide derived from viral capsid protein
RAVFQAKKRLLEPLG

SEQ ID NO: 1481 - protein, 15 aa, Artificial Sequence
  peptide derived from viral capsid protein
RDNVDADKVMITNEE

SEQ ID NO: 1482 - protein, 15 aa, Artificial Sequence
  peptide derived from viral capsid protein
SNNVEFAVNTEGVYS

SEQ ID NO: 1483 - protein, 15 aa, Artificial Sequence
  peptide derived from viral capsid protein
TEGVYSEPRPIGTRY

SEQ ID NO: 1484 - protein, 15 aa, Artificial Sequence
  peptide derived from viral capsid protein
TSGGSSNDNAYFGYS

SEQ ID NO: 1485 - protein, 15 aa, Artificial Sequence
  peptide derived from viral capsid protein
TVTQNNNSEFAWPGA

SEQ ID NO: 1486 - protein, 15 aa, Artificial Sequence
  peptide derived from viral capsid protein
VLPGYKYLGPGNGLD

SEQ ID NO: 1487 - protein, 15 aa, Artificial Sequence
  peptide derived from viral capsid protein
ADPPTAFNKDKLNSF

SEQ ID NO: 1488 - protein, 15 aa, Artificial Sequence
  peptide derived from viral capsid protein
ALNGRNSLMNPGPAM

SEQ ID NO: 1489 - protein, 15 aa, Artificial Sequence
  peptide derived from viral capsid protein
APSGVGSLTMASGGG

SEQ ID NO: 1490 - protein, 15 aa, Artificial Sequence
  peptide derived from viral capsid protein
DNLSEGIREWWALKP

SEQ ID NO: 1491 - protein, 15 aa, Artificial Sequence
  peptide derived from viral capsid protein
DPPTAFNKDKLNSFI

SEQ ID NO: 1492 - protein, 15 aa, Artificial Sequence
  peptide derived from viral capsid protein
DSQWLGDRVITTSTR

SEQ ID NO: 1493 - protein, 15 aa, Artificial Sequence
  peptide derived from viral capsid protein
DSSAGIGKSGAQPAK

SEQ ID NO: 1494 - protein, 15 aa, Artificial Sequence
  peptide derived from viral capsid protein
DVFMIPQYGYLTLND

SEQ ID NO: 1495 - protein, 15 aa, Artificial Sequence
  peptide derived from viral capsid protein
GIGKSGAQPAKKRLN

SEQ ID NO: 1496 - protein, 15 aa, Artificial Sequence
  peptide derived from viral capsid protein
GKQGTGRDNVDADKV

SEQ ID NO: 1497 - protein, 15 aa, Artificial Sequence
  peptide derived from viral capsid protein
GNFHPSPLMGGFGMK

SEQ ID NO: 1498 - protein, 15 aa, Artificial Sequence
  peptide derived from viral capsid protein
GVGSSSGNWHCDSQW

SEQ ID NO: 1499 - protein, 15 aa, Artificial Sequence
  peptide derived from viral capsid protein
ISNSTSGGSSNDNAY

SEQ ID NO: 1500 - protein, 15 aa, Artificial Sequence
  peptide derived from viral capsid protein
KLNSFITQYSTGQVS

SEQ ID NO: 1501 - protein, 15 aa, Artificial Sequence
  peptide derived from viral capsid protein
KNTPVPADPPTAFNK

SEQ ID NO: 1502 - protein, 15 aa, Artificial Sequence
  peptide derived from viral capsid protein
KYLGPGNGLDKGEPV

SEQ ID NO: 1503 - protein, 15 aa, Artificial Sequence
  peptide derived from viral capsid protein
LGRAVFQAKKRLLEP

SEQ ID NO: 1504 - protein, 15 aa, Artificial Sequence
  peptide derived from viral capsid protein
LGSAHEGCLPPFPAD

SEQ ID NO: 1505 - protein, 15 aa, Artificial Sequence
  peptide derived from viral capsid protein
MNPGPAMASHKEGED

SEQ ID NO: 1506 - protein, 15 aa, Artificial Sequence
  peptide derived from viral capsid protein
NMAVQGRNYIPGPSY

SEQ ID NO: 1507 - protein, 15 aa, Artificial Sequence
  peptide derived from viral capsid protein
NNEGADGVGSSSGNW

SEQ ID NO: 1508 - protein, 15 aa, Artificial Sequence
  peptide derived from viral capsid protein
NWHCDSQWLGDRVIT

SEQ ID NO: 1509 - protein, 15 aa, Artificial Sequence
  peptide derived from viral capsid protein
PAMASHKEGEDRFFP

SEQ ID NO: 1510 - protein, 15 aa, Artificial Sequence
  peptide derived from viral capsid protein
PEIQYTSNYYKSNNV

SEQ ID NO: 1511 - protein, 15 aa, Artificial Sequence
  peptide derived from viral capsid protein
QQRVSTTVTQNNNSE

SEQ ID NO: 1512 - protein, 15 aa, Artificial Sequence
  peptide derived from viral capsid protein
RLLEPLGLVEEAAKT

SEQ ID NO: 1513 - protein, 15 aa, Artificial Sequence
  peptide derived from viral capsid protein
RPVEQSPQEPDSSAG

SEQ ID NO: 1514 - protein, 15 aa, Artificial Sequence
  peptide derived from viral capsid protein
TAFNKDKLNSFITQY

SEQ ID NO: 1515 - protein, 15 aa, Artificial Sequence
  peptide derived from viral capsid protein
TGWVQNQGILPGMVW

SEQ ID NO: 1516 - protein, 15 aa, Artificial Sequence
  peptide derived from viral capsid protein
TQNNNSEFAWPGASS

SEQ ID NO: 1517 - protein, 15 aa, Artificial Sequence
  peptide derived from viral capsid protein
VKEVTDNNGVKTIAN

SEQ ID NO: 1518 - protein, 15 aa, Artificial Sequence
  peptide derived from viral capsid protein
VPDPQPIGEPPAAPS

SEQ ID NO: 1519 - protein, 15 aa, Artificial Sequence
  peptide derived from viral capsid protein
VQNQGILPGMVWQDR

SEQ ID NO: 1520 - protein, 15 aa, Artificial Sequence
  peptide derived from viral capsid protein
YFPSQMLRTGNNFQF

SEQ ID NO: 1521 - protein, 15 aa, Artificial Sequence
  peptide derived from viral capsid protein
YVLGSAHEGCLPPFP

SEQ ID NO: 1522 - protein, 15 aa, Artificial Sequence
  peptide derived from viral capsid protein
ADGVGSSSGNWHCDS

SEQ ID NO: 1523 - protein, 15 aa, Artificial Sequence
  peptide derived from viral capsid protein
ANQQHQDNARGLVLP

SEQ ID NO: 1524 - protein, 15 aa, Artificial Sequence
  peptide derived from viral capsid protein
AQPAKKRLNFGQTGD

SEQ ID NO: 1525 - protein, 15 aa, Artificial Sequence
  peptide derived from viral capsid protein
ARGLVLPGYKYLGPG

SEQ ID NO: 1526 - protein, 15 aa, Artificial Sequence
  peptide derived from viral capsid protein
ASSWALNGRNSLMNP

SEQ ID NO: 1527 - protein, 15 aa, Artificial Sequence
  peptide derived from viral capsid protein
AVNTEGVYSEPRPIG

SEQ ID NO: 1528 - protein, 15 aa, Artificial Sequence
  peptide derived from viral capsid protein
DNNEGADGVGSSSGN

SEQ ID NO: 1529 - protein, 15 aa, Artificial Sequence
  peptide derived from viral capsid protein
DPQPIGEPPAAPSGV

SEQ ID NO: 1530 - protein, 15 aa, Artificial Sequence
  peptide derived from viral capsid protein
DRFFPLSGSLIFGKQ

SEQ ID NO: 1531 - protein, 15 aa, Artificial Sequence
  peptide derived from viral capsid protein
FGMKHPPPQILIKNT

SEQ ID NO: 1532 - protein, 15 aa, Artificial Sequence
  peptide derived from viral capsid protein
GLVLPGYKYLGPGNG

SEQ ID NO: 1533 - protein, 15 aa, Artificial Sequence
  peptide derived from viral capsid protein
GNLGRAVFQAKKRLL

SEQ ID NO: 1534 - protein, 15 aa, Artificial Sequence
  peptide derived from viral capsid protein
GPGNGLDKGEPVNAA

SEQ ID NO: 1535 - protein, 15 aa, Artificial Sequence
  peptide derived from viral capsid protein
GQTGDTESVPDPQPI

SEQ ID NO: 1536 - protein, 15 aa, Artificial Sequence
  peptide derived from viral capsid protein
GSSSGNWHCDSQWLG

SEQ ID NO: 1537 - protein, 15 aa, Artificial Sequence
  peptide derived from viral capsid protein
GWVQNQGILPGMVWQ

SEQ ID NO: 1538 - protein, 15 aa, Artificial Sequence
  peptide derived from viral capsid protein
IANNLTSTVQVFTDS

SEQ ID NO: 1539 - protein, 15 aa, Artificial Sequence
  peptide derived from viral capsid protein
KKRLLEPLGLVEEAA

SEQ ID NO: 1540 - protein, 15 aa, Artificial Sequence
  peptide derived from viral capsid protein
KKRLNFGQTGDTESV

SEQ ID NO: 1541 - protein, 15 aa, Artificial Sequence
  peptide derived from viral capsid protein
LEPLGLVEEAAKTAP

SEQ ID NO: 1542 - protein, 15 aa, Artificial Sequence
  peptide derived from viral capsid protein
LGLVEEAAKTAPGKK

SEQ ID NO: 1543 - protein, 15 aa, Artificial Sequence
  peptide derived from viral capsid protein
LKAGDNPYLKYNHAD

SEQ ID NO: 1544 - protein, 15 aa, Artificial Sequence
  peptide derived from viral capsid protein
LMGGFGMKHPPPQIL

SEQ ID NO: 1545 - protein, 15 aa, Artificial Sequence
  peptide derived from viral capsid protein
LNDGSQAVGRSSFYC

SEQ ID NO: 1546 - protein, 15 aa, Artificial Sequence
  peptide derived from viral capsid protein
LPYVLGSAHEGCLPP

SEQ ID NO: 1547 - protein, 15 aa, Artificial Sequence
  peptide derived from viral capsid protein
LSEGIREWWALKPGA

SEQ ID NO: 1548 - protein, 15 aa, Artificial Sequence
  peptide derived from viral capsid protein
MKHPPPQILIKNTPV

SEQ ID NO: 1549 - protein, 15 aa, Artificial Sequence
  peptide derived from viral capsid protein
NLSEGIREWWALKPG

SEQ ID NO: 1550 - protein, 15 aa, Artificial Sequence
  peptide derived from viral capsid protein
NSTSGGSSNDNAYFG

SEQ ID NO: 1551 - protein, 15 aa, Artificial Sequence
  peptide derived from viral capsid protein
NTEGVYSEPRPIGTR

SEQ ID NO: 1552 - protein, 15 aa, Artificial Sequence
  peptide derived from viral capsid protein
NYYKSNNVEFAVNTE

SEQ ID NO: 1553 - protein, 15 aa, Artificial Sequence
  peptide derived from viral capsid protein
PADPPTAFNKDKLNS

SEQ ID NO: 1554 - protein, 15 aa, Artificial Sequence
  peptide derived from viral capsid protein
PAKKRLNFGQTGDTE

SEQ ID NO: 1555 - protein, 15 aa, Artificial Sequence
  peptide derived from viral capsid protein
PLIDQYLYYLSKTIN

SEQ ID NO: 1556 - protein, 15 aa, Artificial Sequence
  peptide derived from viral capsid protein
PLMGGFGMKHPPPQI

SEQ ID NO: 1557 - protein, 15 aa, Artificial Sequence
  peptide derived from viral capsid protein
PQEPDSSAGIGKSGA

SEQ ID NO: 1558 - protein, 15 aa, Artificial Sequence
  peptide derived from viral capsid protein
PQPKANQQHQDNARG

SEQ ID NO: 1559 - protein, 15 aa, Artificial Sequence
  peptide derived from viral capsid protein
PSPLMGGFGMKHPPP

SEQ ID NO: 1560 - protein, 15 aa, Artificial Sequence
  peptide derived from viral capsid protein
PSQMLRTGNNFQFSY

SEQ ID NO: 1561 - protein, 15 aa, Artificial Sequence
  peptide derived from viral capsid protein
PSYRQQRVSTTVTQN

SEQ ID NO: 1562 - protein, 15 aa, Artificial Sequence
  peptide derived from viral capsid protein
QNQQTLKFSVAGPSN

SEQ ID NO: 1563 - protein, 15 aa, Artificial Sequence
  peptide derived from viral capsid protein
QTGWVQNQGILPGMV

SEQ ID NO: 1564 - protein, 15 aa, Artificial Sequence
  peptide derived from viral capsid protein
QYTSNYYKSNNVEFA

SEQ ID NO: 1565 - protein, 15 aa, Artificial Sequence
  peptide derived from viral capsid protein
RLMNPLIDQYLYYLS

SEQ ID NO: 1566 - protein, 15 aa, Artificial Sequence
  peptide derived from viral capsid protein
RLNFGQTGDTESVPD

SEQ ID NO: 1567 - protein, 15 aa, Artificial Sequence
  peptide derived from viral capsid protein
RNSLMNPGPAMASHK

SEQ ID NO: 1568 - protein, 15 aa, Artificial Sequence
  peptide derived from viral capsid protein
SAQAQAQTGWVQNQG

SEQ ID NO: 1569 - protein, 15 aa, Artificial Sequence
  peptide derived from viral capsid protein
SGNWHCDSQWLGDRV

SEQ ID NO: 1570 - protein, 15 aa, Artificial Sequence
  peptide derived from viral capsid protein
SHKEGEDRFFPLSGS

SEQ ID NO: 1571 - protein, 15 aa, Artificial Sequence
  peptide derived from viral capsid protein
SLMNPGPAMASHKEG

SEQ ID NO: 1572 - protein, 15 aa, Artificial Sequence
  peptide derived from viral capsid protein
SQMLRTGNNFQFSYE

SEQ ID NO: 1573 - protein, 15 aa, Artificial Sequence
  peptide derived from viral capsid protein
TDSDYQLPYVLGSAH

SEQ ID NO: 1574 - protein, 15 aa, Artificial Sequence
  peptide derived from viral capsid protein
TESYGQVATNHQSAQ

SEQ ID NO: 1575 - protein, 15 aa, Artificial Sequence
  peptide derived from viral capsid protein
TLKFSVAGPSNMAVQ

SEQ ID NO: 1576 - protein, 15 aa, Artificial Sequence
  peptide derived from viral capsid protein
TSNYYKSNNVEFAVN

SEQ ID NO: 1577 - protein, 15 aa, Artificial Sequence
  peptide derived from viral capsid protein
VFTDSDYQLPYVLGS

SEQ ID NO: 1578 - protein, 15 aa, Artificial Sequence
  peptide derived from viral capsid protein
VGSLTMASGGGAPVA

SEQ ID NO: 1579 - protein, 15 aa, Artificial Sequence
  peptide derived from viral capsid protein
VPADPPTAFNKDKLN

SEQ ID NO: 1580 - protein, 15 aa, Artificial Sequence
  peptide derived from viral capsid protein
WVQNQGILPGMVWQD

SEQ ID NO: 1581 - protein, 15 aa, Artificial Sequence
  peptide derived from viral capsid protein
WWALKPGAPQPKANQ

SEQ ID NO: 1582 - protein, 15 aa, Artificial Sequence
  peptide derived from viral capsid protein
YDQQLKAGDNPYLKY

SEQ ID NO: 1583 - protein, 15 aa, Artificial Sequence
  peptide derived from viral capsid protein
YKYLGPGNGLDKGEP

SEQ ID NO: 1584 - protein, 15 aa, Artificial Sequence
  peptide derived from viral capsid protein
YLGPGNGLDKGEPVN

SEQ ID NO: 1585 - protein, 15 aa, Artificial Sequence
  peptide derived from viral capsid protein
YRQQRVSTTVTQNNN

SEQ ID NO: 1586 - protein, 15 aa, Artificial Sequence
  peptide derived from viral capsid protein
YYKSNNVEFAVNTEG

SEQ ID NO: 1587 - protein, 15 aa, Artificial Sequence
  peptide derived from viral capsid protein
TDGNFHPSPLMGGFG

SEQ ID NO: 1588 - protein, 15 aa, Artificial Sequence
  peptide derived from viral capsid protein
WELQKENSKRWNPEI

SEQ ID NO: 1589 - protein, 15 aa, Artificial Sequence
  peptide derived from viral capsid protein
HTDGNFHPSPLMGGF

SEQ ID NO: 1590 - protein, 15 aa, Artificial Sequence
  peptide derived from viral capsid protein
PHTDGNFHPSPLMGG

SEQ ID NO: 1591 - protein, 15 aa, Artificial Sequence
  peptide derived from viral capsid protein
AKIPHTDGNFHPSPL

SEQ ID NO: 1592 - protein, 15 aa, Artificial Sequence
  peptide derived from viral capsid protein
QKENSKRWNPEIQYT

SEQ ID NO: 1593 - protein, 15 aa, Artificial Sequence
  peptide derived from viral capsid protein
GPIWAKIPHTDGNFH

SEQ ID NO: 1594 - protein, 15 aa, Artificial Sequence
  peptide derived from viral capsid protein
GVYSEPRPIGTRYLT

SEQ ID NO: 1595 - protein, 15 aa, Artificial Sequence
  peptide derived from viral capsid protein
KENSKRWNPEIQYTS

SEQ ID NO: 1596 - protein, 15 aa, Artificial Sequence
  peptide derived from viral capsid protein
KIPHTDGNFHPSPLM

SEQ ID NO: 1597 - protein, 15 aa, Artificial Sequence
  peptide derived from viral capsid protein
LQKENSKRWNPEIQY

SEQ ID NO: 1598 - protein, 15 aa, Artificial Sequence
  peptide derived from viral capsid protein
PIWAKIPHTDGNFHP

SEQ ID NO: 1599 - protein, 15 aa, Artificial Sequence
  peptide derived from viral capsid protein
TIQVFTDSEYQLPYV

SEQ ID NO: 1600 - protein, 15 aa, Artificial Sequence
  peptide derived from viral capsid protein
NNLTSTIQVFTDSEY

SEQ ID NO: 1601 - protein, 15 aa, Artificial Sequence
  peptide derived from viral capsid protein
HKDDEERFFPSNGIL

SEQ ID NO: 1602 - protein, 15 aa, Artificial Sequence
  peptide derived from viral capsid protein
SSGNWHCDSTWLGDR

SEQ ID NO: 1603 - protein, 15 aa, Artificial Sequence
  peptide derived from viral capsid protein
ATNDNTYFGYSTPWG

SEQ ID NO: 1604 - protein, 15 aa, Artificial Sequence
  peptide derived from viral capsid protein
NFQFTYTFEDVPFHS

SEQ ID NO: 1605 - protein, 15 aa, Artificial Sequence
  peptide derived from viral capsid protein
TAPGKKRPVEPSPQR

SEQ ID NO: 1606 - protein, 15 aa, Artificial Sequence
  peptide derived from viral capsid protein
AALEHDKAYDQQLQA

SEQ ID NO: 1607 - protein, 15 aa, Artificial Sequence
  peptide derived from viral capsid protein
ADYSDVMLTSEEEIK

SEQ ID NO: 1608 - protein, 15 aa, Artificial Sequence
  peptide derived from viral capsid protein
ATHKDDEERFFPSNG

SEQ ID NO: 1609 - protein, 15 aa, Artificial Sequence
  peptide derived from viral capsid protein
EPPAAPSGVGPNTMA

SEQ ID NO: 1610 - protein, 15 aa, Artificial Sequence
  peptide derived from viral capsid protein
EWWALKPGAPKPKAN

SEQ ID NO: 1611 - protein, 15 aa, Artificial Sequence
  peptide derived from viral capsid protein
FGKQNAARDNADYSD

SEQ ID NO: 1612 - protein, 15 aa, Artificial Sequence
  peptide derived from viral capsid protein
MAAGGGAPMADNNEG

SEQ ID NO: 1613 - protein, 15 aa, Artificial Sequence
  peptide derived from viral capsid protein
PQIGTVNSQGALPGM

SEQ ID NO: 1614 - protein, 15 aa, Artificial Sequence
  peptide derived from viral capsid protein
QVFTDSEYQLPYVLG

SEQ ID NO: 1615 - protein, 15 aa, Artificial Sequence
  peptide derived from viral capsid protein
VGSSSGNWHCDSTWL

SEQ ID NO: 1616 - protein, 15 aa, Artificial Sequence
  peptide derived from viral capsid protein
ANNLTSTIQVFTDSE

SEQ ID NO: 1617 - protein, 15 aa, Artificial Sequence
  peptide derived from viral capsid protein
GIAMATHKDDEERFF

SEQ ID NO: 1618 - protein, 15 aa, Artificial Sequence
  peptide derived from viral capsid protein
GVGSSSGNWHCDSTW

SEQ ID NO: 1619 - protein, 15 aa, Artificial Sequence
  peptide derived from viral capsid protein
IDQYLYYLSRTQTTG

SEQ ID NO: 1620 - protein, 15 aa, Artificial Sequence
  peptide derived from viral capsid protein
IQVFTDSEYQLPYVL

SEQ ID NO: 1621 - protein, 15 aa, Artificial Sequence
  peptide derived from viral capsid protein
RQQRVSTTTGQNNNS

SEQ ID NO: 1622 - protein, 15 aa, Artificial Sequence
  peptide derived from viral capsid protein
TAPQIGTVNSQGALP

SEQ ID NO: 1623 - protein, 15 aa, Artificial Sequence
  peptide derived from viral capsid protein
YDQQLQAGDNPYLRY

SEQ ID NO: 1624 - protein, 15 aa, Artificial Sequence
  peptide derived from viral capsid protein
ATEEYGIVADNLQQQ

SEQ ID NO: 1625 - protein, 15 aa, Artificial Sequence
  peptide derived from viral capsid protein
EGAKTAPGKKRPVEP

SEQ ID NO: 1626 - protein, 15 aa, Artificial Sequence
  peptide derived from viral capsid protein
EVTQNEGTKTIANNL

SEQ ID NO: 1627 - protein, 15 aa, Artificial Sequence
  peptide derived from viral capsid protein
FKLFNIQVKEVTQNE

SEQ ID NO: 1628 - protein, 15 aa, Artificial Sequence
  peptide derived from viral capsid protein
FPSQMLRTGNNFQFT

SEQ ID NO: 1629 - protein, 15 aa, Artificial Sequence
  peptide derived from viral capsid protein
GPNTMANQAKNWLPG

SEQ ID NO: 1630 - protein, 15 aa, Artificial Sequence
  peptide derived from viral capsid protein
LEHDKAYDQQLQAGD

SEQ ID NO: 1631 - protein, 15 aa, Artificial Sequence
  peptide derived from viral capsid protein
LIFGKQNAARDNADY

SEQ ID NO: 1632 - protein, 15 aa, Artificial Sequence
  peptide derived from viral capsid protein
LTSTIQVFTDSEYQL

SEQ ID NO: 1633 - protein, 15 aa, Artificial Sequence
  peptide derived from viral capsid protein
LYKQISNGTSGGATN

SEQ ID NO: 1634 - protein, 15 aa, Artificial Sequence
  peptide derived from viral capsid protein
MANQAKNWLPGPCYR

SEQ ID NO: 1635 - protein, 15 aa, Artificial Sequence
  peptide derived from viral capsid protein
NLTSTIQVFTDSEYQ

SEQ ID NO: 1636 - protein, 15 aa, Artificial Sequence
  peptide derived from viral capsid protein
NPGIAMATHKDDEER

SEQ ID NO: 1637 - protein, 15 aa, Artificial Sequence
  peptide derived from viral capsid protein
NQSKLNSFITQYSTG

SEQ ID NO: 1638 - protein, 15 aa, Artificial Sequence
  peptide derived from viral capsid protein
PNTMAAGGGAPMADN

SEQ ID NO: 1639 - protein, 15 aa, Artificial Sequence
  peptide derived from viral capsid protein
SFKLFNIQVKEVTQN

SEQ ID NO: 1640 - protein, 15 aa, Artificial Sequence
  peptide derived from viral capsid protein
TDSEYQLPYVLGSAH

SEQ ID NO: 1641 - protein, 15 aa, Artificial Sequence
  peptide derived from viral capsid protein
TMAAGGGAPMADNNE

SEQ ID NO: 1642 - protein, 15 aa, Artificial Sequence
  peptide derived from viral capsid protein
AMATHKDDEERFFPS

SEQ ID NO: 1643 - protein, 15 aa, Artificial Sequence
  peptide derived from viral capsid protein
APSGVGPNTMAAGGG

SEQ ID NO: 1644 - protein, 15 aa, Artificial Sequence
  peptide derived from viral capsid protein
DPPTTFNQSKLNSFI

SEQ ID NO: 1645 - protein, 15 aa, Artificial Sequence
  peptide derived from viral capsid protein
DPQPLGEPPAAPSGV

SEQ ID NO: 1646 - protein, 15 aa, Artificial Sequence
  peptide derived from viral capsid protein
EGIREWWALKPGAPK

SEQ ID NO: 1647 - protein, 15 aa, Artificial Sequence
  peptide derived from viral capsid protein
FPSNGILIFGKQNAA

SEQ ID NO: 1648 - protein, 15 aa, Artificial Sequence
  peptide derived from viral capsid protein
FTDSEYQLPYVLGSA

SEQ ID NO: 1649 - protein, 15 aa, Artificial Sequence
  peptide derived from viral capsid protein
GAKTAPGKKRPVEPS

SEQ ID NO: 1650 - protein, 15 aa, Artificial Sequence
  peptide derived from viral capsid protein
GGTANTQTLGFSQGG

SEQ ID NO: 1651 - protein, 15 aa, Artificial Sequence
  peptide derived from viral capsid protein
GILIFGKQNAARDNA

SEQ ID NO: 1652 - protein, 15 aa, Artificial Sequence
  peptide derived from viral capsid protein
GTKTIANNLTSTIQV

SEQ ID NO: 1653 - protein, 15 aa, Artificial Sequence
  peptide derived from viral capsid protein
INNNWGFRPKRLSFK

SEQ ID NO: 1654 - protein, 15 aa, Artificial Sequence
  peptide derived from viral capsid protein
IQYTSNYYKSTSVDF

SEQ ID NO: 1655 - protein, 15 aa, Artificial Sequence
  peptide derived from viral capsid protein
ISNGTSGGATNDNTY

SEQ ID NO: 1656 - protein, 15 aa, Artificial Sequence
  peptide derived from viral capsid protein
KAYDQQLQAGDNPYL

SEQ ID NO: 1657 - protein, 15 aa, Artificial Sequence
  peptide derived from viral capsid protein
KEVTQNEGTKTIANN

SEQ ID NO: 1658 - protein, 15 aa, Artificial Sequence
  peptide derived from viral capsid protein
KLFNIQVKEVTQNEG

SEQ ID NO: 1659 - protein, 15 aa, Artificial Sequence
  peptide derived from viral capsid protein
KSTSVDFAVNTEGVY

SEQ ID NO: 1660 - protein, 15 aa, Artificial Sequence
  peptide derived from viral capsid protein
KTIANNLTSTIQVFT

SEQ ID NO: 1661 - protein, 15 aa, Artificial Sequence
  peptide derived from viral capsid protein
KTTNPVATEEYGIVA

SEQ ID NO: 1662 - protein, 15 aa, Artificial Sequence
  peptide derived from viral capsid protein
LMNPLIDQYLYYLSR

SEQ ID NO: 1663 - protein, 15 aa, Artificial Sequence
  peptide derived from viral capsid protein
LPTYNNHLYKQISNG

SEQ ID NO: 1664 - protein, 15 aa, Artificial Sequence
  peptide derived from viral capsid protein
LTSEEEIKTTNPVAT

SEQ ID NO: 1665 - protein, 15 aa, Artificial Sequence
  peptide derived from viral capsid protein
MADNNEGADGVGSSS

SEQ ID NO: 1666 - protein, 15 aa, Artificial Sequence
  peptide derived from viral capsid protein
NGTSGGATNDNTYFG

SEQ ID NO: 1667 - protein, 15 aa, Artificial Sequence
  peptide derived from viral capsid protein
NHLYKQISNGTSGGA

SEQ ID NO: 1668 - protein, 15 aa, Artificial Sequence
  peptide derived from viral capsid protein
NIQVKEVTQNEGTKT

SEQ ID NO: 1669 - protein, 15 aa, Artificial Sequence
  peptide derived from viral capsid protein
NLQQQNTAPQIGTVN

SEQ ID NO: 1670 - protein, 15 aa, Artificial Sequence
  peptide derived from viral capsid protein
NNHLYKQISNGTSGG

SEQ ID NO: 1671 - protein, 15 aa, Artificial Sequence
  peptide derived from viral capsid protein
NTMANQAKNWLPGPC

SEQ ID NO: 1672 - protein, 15 aa, Artificial Sequence
  peptide derived from viral capsid protein
PEIQYTSNYYKSTSV

SEQ ID NO: 1673 - protein, 15 aa, Artificial Sequence
  peptide derived from viral capsid protein
PGKKRPVEPSPQRSP

SEQ ID NO: 1674 - protein, 15 aa, Artificial Sequence
  peptide derived from viral capsid protein
PTYNNHLYKQISNGT

SEQ ID NO: 1675 - protein, 15 aa, Artificial Sequence
  peptide derived from viral capsid protein
QGGPNTMANQAKNWL

SEQ ID NO: 1676 - protein, 15 aa, Artificial Sequence
  peptide derived from viral capsid protein
QNEGTKTIANNLTST

SEQ ID NO: 1677 - protein, 15 aa, Artificial Sequence
  peptide derived from viral capsid protein
QNNNSNFAWTAGTKY

SEQ ID NO: 1678 - protein, 15 aa, Artificial Sequence
  peptide derived from viral capsid protein
QNTAPQIGTVNSQGA

SEQ ID NO: 1679 - protein, 15 aa, Artificial Sequence
  peptide derived from viral capsid protein
QPLGEPPAAPSGVGP

SEQ ID NO: 1680 - protein, 15 aa, Artificial Sequence
  peptide derived from viral capsid protein
QTLGFSQGGPNTMAN

SEQ ID NO: 1681 - protein, 15 aa, Artificial Sequence
  peptide derived from viral capsid protein
QVKEVTQNEGTKTIA

SEQ ID NO: 1682 - protein, 15 aa, Artificial Sequence
  peptide derived from viral capsid protein
SGVGPNTMAAGGGAP

SEQ ID NO: 1683 - protein, 15 aa, Artificial Sequence
  peptide derived from viral capsid protein
SNFAWTAGTKYHLNG

SEQ ID NO: 1684 - protein, 15 aa, Artificial Sequence
  peptide derived from viral capsid protein
SQGALPGMVWQNRDV

SEQ ID NO: 1685 - protein, 15 aa, Artificial Sequence
  peptide derived from viral capsid protein
TQNEGTKTIANNLTS

SEQ ID NO: 1686 - protein, 15 aa, Artificial Sequence
  peptide derived from viral capsid protein
TSGGATNDNTYFGYS

SEQ ID NO: 1687 - protein, 15 aa, Artificial Sequence
  peptide derived from viral capsid protein
TSTIQVFTDSEYQLP

SEQ ID NO: 1688 - protein, 15 aa, Artificial Sequence
  peptide derived from viral capsid protein
TYNNHLYKQISNGTS

SEQ ID NO: 1689 - protein, 15 aa, Artificial Sequence
  peptide derived from viral capsid protein
VGPNTMAAGGGAPMA

SEQ ID NO: 1690 - protein, 15 aa, Artificial Sequence
  peptide derived from viral capsid protein
VMLTSEEEIKTTNPV

SEQ ID NO: 1691 - protein, 15 aa, Artificial Sequence
  peptide derived from viral capsid protein
WLPGPCYRQQRVSTT

SEQ ID NO: 1692 - protein, 15 aa, Artificial Sequence
  peptide derived from viral capsid protein
YLSRTQTTGGTANTQ

SEQ ID NO: 1693 - protein, 15 aa, Artificial Sequence
  peptide derived from viral capsid protein
YYKSTSVDFAVNTEG

SEQ ID NO: 1694 - protein, 15 aa, Artificial Sequence
  peptide derived from viral capsid protein
DGNFHPSPLMGGFGL

SEQ ID NO: 1695 - protein, 15 aa, Artificial Sequence
  peptide derived from viral capsid protein
NDNTYFGYSTPWGYF

SEQ ID NO: 1696 - protein, 15 aa, Artificial Sequence
  peptide derived from viral capsid protein
GALPGMVWQNRDVYL

SEQ ID NO: 1697 - protein, 15 aa, Artificial Sequence
  peptide derived from viral capsid protein
AGGGAPMADNNEGAD

SEQ ID NO: 1698 - protein, 15 aa, Artificial Sequence
  peptide derived from viral capsid protein
RPVEPSPQRSPDSST

SEQ ID NO: 1699 - protein, 15 aa, Artificial Sequence
  peptide derived from viral capsid protein
MVWQNRDVYLQGPIW

SEQ ID NO: 1700 - protein, 15 aa, Artificial Sequence
  peptide derived from viral capsid protein
TNDNTYFGYSTPWGY

SEQ ID NO: 1701 - protein, 15 aa, Artificial Sequence
  peptide derived from viral capsid protein
KRPVEPSPQRSPDSS

SEQ ID NO: 1702 - protein, 15 aa, Artificial Sequence
  peptide derived from viral capsid protein
LPGMVWQNRDVYLQG

SEQ ID NO: 1703 - protein, 15 aa, Artificial Sequence
  peptide derived from viral capsid protein
VPDPQPLGEPPAAPS

SEQ ID NO: 1704 - protein, 15 aa, Artificial Sequence
  peptide derived from viral capsid protein
VWQNRDVYLQGPIWA

SEQ ID NO: 1705 - protein, 15 aa, Artificial Sequence
  peptide derived from viral capsid protein
AAGGGAPMADNNEGA

SEQ ID NO: 1706 - protein, 15 aa, Artificial Sequence
  peptide derived from viral capsid protein
DSSTGIGKKGQQPAR

SEQ ID NO: 1707 - protein, 15 aa, Artificial Sequence
  peptide derived from viral capsid protein
GKKGQQPARKRLNFG

SEQ ID NO: 1708 - protein, 15 aa, Artificial Sequence
  peptide derived from viral capsid protein
NFHPSPLMGGFGLKH

SEQ ID NO: 1709 - protein, 15 aa, Artificial Sequence
  peptide derived from viral capsid protein
QGALPGMVWQNRDVY

SEQ ID NO: 1710 - protein, 15 aa, Artificial Sequence
  peptide derived from viral capsid protein
QQPARKRLNFGQTGD

SEQ ID NO: 1711 - protein, 15 aa, Artificial Sequence
  peptide derived from viral capsid protein
ALPGMVWQNRDVYLQ

SEQ ID NO: 1712 - protein, 15 aa, Artificial Sequence
  peptide derived from viral capsid protein
GIGKKGQQPARKRLN

SEQ ID NO: 1713 - protein, 15 aa, Artificial Sequence
  peptide derived from viral capsid protein
GMVWQNRDVYLQGPI

SEQ ID NO: 1714 - protein, 15 aa, Artificial Sequence
  peptide derived from viral capsid protein
GNFHPSPLMGGFGLK

SEQ ID NO: 1715 - protein, 15 aa, Artificial Sequence
  peptide derived from viral capsid protein
KKRPVEPSPQRSPDS

SEQ ID NO: 1716 - protein, 15 aa, Artificial Sequence
  peptide derived from viral capsid protein
PDSSTGIGKKGQQPA

SEQ ID NO: 1717 - protein, 15 aa, Artificial Sequence
  peptide derived from viral capsid protein
PGMVWQNRDVYLQGP

SEQ ID NO: 1718 - protein, 15 aa, Artificial Sequence
  peptide derived from viral capsid protein
QRSPDSSTGIGKKGQ

SEQ ID NO: 1719 - protein, 15 aa, Artificial Sequence
  peptide derived from viral capsid protein
VEPSPQRSPDSSTGI

SEQ ID NO: 1720 - protein, 15 aa, Artificial Sequence
  peptide derived from viral capsid protein
QAKKRVLEPLGLVEE

SEQ ID NO: 1721 - protein, 15 aa, Artificial Sequence
  peptide derived from viral capsid protein
EPLGLVEEGAKTAPG

SEQ ID NO: 1722 - protein, 15 aa, Artificial Sequence
  peptide derived from viral capsid protein
RAVFQAKKRVLEPLG

SEQ ID NO: 1723 - protein, 15 aa, Artificial Sequence
  peptide derived from viral capsid protein
AKKRVLEPLGLVEEG

SEQ ID NO: 1724 - protein, 15 aa, Artificial Sequence
  peptide derived from viral capsid protein
FQAKKRVLEPLGLVE

SEQ ID NO: 1725 - protein, 15 aa, Artificial Sequence
  peptide derived from viral capsid protein
PLGLVEEGAKTAPGK

SEQ ID NO: 1726 - protein, 15 aa, Artificial Sequence
  peptide derived from viral capsid protein
RVLEPLGLVEEGAKT

SEQ ID NO: 1727 - protein, 15 aa, Artificial Sequence
  peptide derived from viral capsid protein
GYSTPWGYFDFNRFH

SEQ ID NO: 1728 - protein, 15 aa, Artificial Sequence
  peptide derived from viral capsid protein
FEFTYNFEEVPFHSS

SEQ ID NO: 1729 - protein, 15 aa, Artificial Sequence
  peptide derived from viral capsid protein
NPTERSSFFCLEYFP

SEQ ID NO: 1730 - protein, 15 aa, Artificial Sequence
  peptide derived from viral capsid protein
GDWHCDSTWMGDRVV

SEQ ID NO: 1731 - protein, 15 aa, Artificial Sequence
  peptide derived from viral capsid protein
TVQVFTDDDYQLPYV

SEQ ID NO: 1732 - protein, 15 aa, Artificial Sequence
  peptide derived from viral capsid protein
FTYNFEEVPFHSSFA

SEQ ID NO: 1733 - protein, 15 aa, Artificial Sequence
  peptide derived from viral capsid protein
VDHPPDWLEEVGEGL

SEQ ID NO: 1734 - protein, 15 aa, Artificial Sequence
  peptide derived from viral capsid protein
RSSFFCLEYFPSKML

SEQ ID NO: 1735 - protein, 15 aa, Artificial Sequence
  peptide derived from viral capsid protein
TGAHFHPSPAMGGFG

SEQ ID NO: 1736 - protein, 15 aa, Artificial Sequence
  peptide derived from viral capsid protein
ASGDWHCDSTWMGDR

SEQ ID NO: 1737 - protein, 15 aa, Artificial Sequence
  peptide derived from viral capsid protein
GVGNASGDWHCDSTW

SEQ ID NO: 1738 - protein, 15 aa, Artificial Sequence
  peptide derived from viral capsid protein
PQFVDFAPDSTGEYR

SEQ ID NO: 1739 - protein, 15 aa, Artificial Sequence
  peptide derived from viral capsid protein
RGEPVNRADEVAREH

SEQ ID NO: 1740 - protein, 15 aa, Artificial Sequence
  peptide derived from viral capsid protein
AYFGYSTPWGYFDFN

SEQ ID NO: 1741 - protein, 15 aa, Artificial Sequence
  peptide derived from viral capsid protein
DNTENPTERSSFFCL

SEQ ID NO: 1742 - protein, 15 aa, Artificial Sequence
  peptide derived from viral capsid protein
DYQLPYVVGNGTEGC

SEQ ID NO: 1743 - protein, 15 aa, Artificial Sequence
  peptide derived from viral capsid protein
PETGAHFHPSPAMGG

SEQ ID NO: 1744 - protein, 15 aa, Artificial Sequence
  peptide derived from viral capsid protein
RADEVAREHDISYNE

SEQ ID NO: 1745 - protein, 15 aa, Artificial Sequence
  peptide derived from viral capsid protein
TERSSFFCLEYFPSK

SEQ ID NO: 1746 - protein, 15 aa, Artificial Sequence
  peptide derived from viral capsid protein
EGLREFLGLEAGPPK

SEQ ID NO: 1747 - protein, 15 aa, Artificial Sequence
  peptide derived from viral capsid protein
NDPQFVDFAPDSTGE

SEQ ID NO: 1748 - protein, 15 aa, Artificial Sequence
  peptide derived from viral capsid protein
PAMGGFGLKHPPPMM

SEQ ID NO: 1749 - protein, 15 aa, Artificial Sequence
  peptide derived from viral capsid protein
VAREHDISYNEQLEA

SEQ ID NO: 1750 - protein, 15 aa, Artificial Sequence
  peptide derived from viral capsid protein
VNRADEVAREHDISY

SEQ ID NO: 1751 - protein, 15 aa, Artificial Sequence
  peptide derived from viral capsid protein
YNHADAEFQEKLADD

SEQ ID NO: 1752 - protein, 15 aa, Artificial Sequence
  peptide derived from viral capsid protein
EPFGLVEEGAKTAPT

SEQ ID NO: 1753 - protein, 15 aa, Artificial Sequence
  peptide derived from viral capsid protein
FSDVPVSSFITQYST

SEQ ID NO: 1754 - protein, 15 aa, Artificial Sequence
  peptide derived from viral capsid protein
FTDDDYQLPYVVGNG

SEQ ID NO: 1755 - protein, 15 aa, Artificial Sequence
  peptide derived from viral capsid protein
HADAEFQEKLADDTS

SEQ ID NO: 1756 - protein, 15 aa, Artificial Sequence
  peptide derived from viral capsid protein
MGGFGLKHPPPMMLI

SEQ ID NO: 1757 - protein, 15 aa, Artificial Sequence
  peptide derived from viral capsid protein
NGLDRGEPVNRADEV

SEQ ID NO: 1758 - protein, 15 aa, Artificial Sequence
  peptide derived from viral capsid protein
NPEIQYTNNYNDPQF

SEQ ID NO: 1759 - protein, 15 aa, Artificial Sequence
  peptide derived from viral capsid protein
QVFTDDDYQLPYVVG

SEQ ID NO: 1760 - protein, 15 aa, Artificial Sequence
  peptide derived from viral capsid protein
REHDISYNEQLEAGD

SEQ ID NO: 1761 - protein, 15 aa, Artificial Sequence
  peptide derived from viral capsid protein
VGEGLREFLGLEAGP

SEQ ID NO: 1762 - protein, 15 aa, Artificial Sequence
  peptide derived from viral capsid protein
WGYFDFNRFHSHWSP

SEQ ID NO: 1763 - protein, 15 aa, Artificial Sequence
  peptide derived from viral capsid protein
WSPRDWQRLINNYWG

SEQ ID NO: 1764 - protein, 15 aa, Artificial Sequence
  peptide derived from viral capsid protein
YFDFNRFHSHWSPRD

SEQ ID NO: 1765 - protein, 15 aa, Artificial Sequence
  peptide derived from viral capsid protein
ADGVGNASGDWHCDS

SEQ ID NO: 1766 - protein, 15 aa, Artificial Sequence
  peptide derived from viral capsid protein
ARTEEDSKPSTSSDA

SEQ ID NO: 1767 - protein, 15 aa, Artificial Sequence
  peptide derived from viral capsid protein
ASVSAFATTNRMELE

SEQ ID NO: 1768 - protein, 15 aa, Artificial Sequence
  peptide derived from viral capsid protein
DFNRFHSHWSPRDWQ

SEQ ID NO: 1769 - protein, 15 aa, Artificial Sequence
  peptide derived from viral capsid protein
EGCLPAFPPQVFTLP

SEQ ID NO: 1770 - protein, 15 aa, Artificial Sequence
  peptide derived from viral capsid protein
ETQPVNRVAYNVGGQ

SEQ ID NO: 1771 - protein, 15 aa, Artificial Sequence
  peptide derived from viral capsid protein
FHPSPAMGGFGLKHP

SEQ ID NO: 1772 - protein, 15 aa, Artificial Sequence
  peptide derived from viral capsid protein
GGGGPLGDNNQGADG

SEQ ID NO: 1773 - protein, 15 aa, Artificial Sequence
  peptide derived from viral capsid protein
GGPLGDNNQGADGVG

SEQ ID NO: 1774 - protein, 15 aa, Artificial Sequence
  peptide derived from viral capsid protein
IDDHFPKRKKARTEE

SEQ ID NO: 1775 - protein, 15 aa, Artificial Sequence
  peptide derived from viral capsid protein
LVEEGAKTAPTGKRI

SEQ ID NO: 1776 - protein, 15 aa, Artificial Sequence
  peptide derived from viral capsid protein
NLQEIVPGSVWMERD

SEQ ID NO: 1777 - protein, 15 aa, Artificial Sequence
  peptide derived from viral capsid protein
NPYLKYNHADAEFQE

SEQ ID NO: 1778 - protein, 15 aa, Artificial Sequence
  peptide derived from viral capsid protein
PAFPPQVFTLPQYGY

SEQ ID NO: 1779 - protein, 15 aa, Artificial Sequence
  peptide derived from viral capsid protein
PASSLGADTMSAGGG

SEQ ID NO: 1780 - protein, 15 aa, Artificial Sequence
  peptide derived from viral capsid protein
PVSSFITQYSTGQVT

SEQ ID NO: 1781 - protein, 15 aa, Artificial Sequence
  peptide derived from viral capsid protein
QGADGVGNASGDWHC

SEQ ID NO: 1782 - protein, 15 aa, Artificial Sequence
  peptide derived from viral capsid protein
TGGVQFNKNLAGRYA

SEQ ID NO: 1783 - protein, 15 aa, Artificial Sequence
  peptide derived from viral capsid protein
VSAFATTNRMELEGA

SEQ ID NO: 1784 - protein, 15 aa, Artificial Sequence
  peptide derived from viral capsid protein
YFPSKMLRTGNNFEF

SEQ ID NO: 1785 - protein, 15 aa, Artificial Sequence
  peptide derived from viral capsid protein
YNFEEVPFHSSFAPS

SEQ ID NO: 1786 - protein, 15 aa, Artificial Sequence
  peptide derived from viral capsid protein
AFATTNRMELEGASY

SEQ ID NO: 1787 - protein, 15 aa, Artificial Sequence
  peptide derived from viral capsid protein
AHFHPSPAMGGFGLK

SEQ ID NO: 1788 - protein, 15 aa, Artificial Sequence
  peptide derived from viral capsid protein
DFAPDSTGEYRTTRP

SEQ ID NO: 1789 - protein, 15 aa, Artificial Sequence
  peptide derived from viral capsid protein
DGSNANAYFGYSTPW

SEQ ID NO: 1790 - protein, 15 aa, Artificial Sequence
  peptide derived from viral capsid protein
DNPYLKYNHADAEFQ

SEQ ID NO: 1791 - protein, 15 aa, Artificial Sequence
  peptide derived from viral capsid protein
DSTGEYRTTRPIGTR

SEQ ID NO: 1792 - protein, 15 aa, Artificial Sequence
  peptide derived from viral capsid protein
EGNMLITSESETQPV

SEQ ID NO: 1793 - protein, 15 aa, Artificial Sequence
  peptide derived from viral capsid protein
FVSTNNTGGVQFNKN

SEQ ID NO: 1794 - protein, 15 aa, Artificial Sequence
  peptide derived from viral capsid protein
GDNPYLKYNHADAEF

SEQ ID NO: 1795 - protein, 15 aa, Artificial Sequence
  peptide derived from viral capsid protein
GGNLGKAVFQAKKRV

SEQ ID NO: 1796 - protein, 15 aa, Artificial Sequence
  peptide derived from viral capsid protein
GTEGCLPAFPPQVFT

SEQ ID NO: 1797 - protein, 15 aa, Artificial Sequence
  peptide derived from viral capsid protein
HDISYNEQLEAGDNP

SEQ ID NO: 1798 - protein, 15 aa, Artificial Sequence
  peptide derived from viral capsid protein
IVPGSVWMERDVYLQ

SEQ ID NO: 1799 - protein, 15 aa, Artificial Sequence
  peptide derived from viral capsid protein
KIPETGAHFHPSPAM

SEQ ID NO: 1800 - protein, 15 aa, Artificial Sequence
  peptide derived from viral capsid protein
KMLRTGNNFEFTYNF

SEQ ID NO: 1801 - protein, 15 aa, Artificial Sequence
  peptide derived from viral capsid protein
LEAGPPKPKPNQQHQ

SEQ ID NO: 1802 - protein, 15 aa, Artificial Sequence
  peptide derived from viral capsid protein
LEYFPSKMLRTGNNF

SEQ ID NO: 1803 - protein, 15 aa, Artificial Sequence
  peptide derived from viral capsid protein
LGPGNGLDRGEPVNR

SEQ ID NO: 1804 - protein, 15 aa, Artificial Sequence
  peptide derived from viral capsid protein
LPGYNYLGPGNGLDR

SEQ ID NO: 1805 - protein, 15 aa, Artificial Sequence
  peptide derived from viral capsid protein
LVDQYLYRFVSTNNT

SEQ ID NO: 1806 - protein, 15 aa, Artificial Sequence
  peptide derived from viral capsid protein
NIQVKEVTVQDSTTT

SEQ ID NO: 1807 - protein, 15 aa, Artificial Sequence
  peptide derived from viral capsid protein
NITSFSDVPVSSFIT

SEQ ID NO: 1808 - protein, 15 aa, Artificial Sequence
  peptide derived from viral capsid protein
NNQGADGVGNASGDW

SEQ ID NO: 1809 - protein, 15 aa, Artificial Sequence
  peptide derived from viral capsid protein
NRASVSAFATTNRME

SEQ ID NO: 1810 - protein, 15 aa, Artificial Sequence
  peptide derived from viral capsid protein
NTPVPGNITSFSDVP

SEQ ID NO: 1811 - protein, 15 aa, Artificial Sequence
  peptide derived from viral capsid protein
NYLGPGNGLDRGEPV

SEQ ID NO: 1812 - protein, 15 aa, Artificial Sequence
  peptide derived from viral capsid protein
PATGTYNLQEIVPGS

SEQ ID NO: 1813 - protein, 15 aa, Artificial Sequence
  peptide derived from viral capsid protein
PGNGLDRGEPVNRAD

SEQ ID NO: 1814 - protein, 15 aa, Artificial Sequence
  peptide derived from viral capsid protein
PGNITSFSDVPVSSF

SEQ ID NO: 1815 - protein, 15 aa, Artificial Sequence
  peptide derived from viral capsid protein
PRDWQRLINNYWGFR

SEQ ID NO: 1816 - protein, 15 aa, Artificial Sequence
  peptide derived from viral capsid protein
PSPAMGGFGLKHPPP

SEQ ID NO: 1817 - protein, 15 aa, Artificial Sequence
  peptide derived from viral capsid protein
PYVVGNGTEGCLPAF

SEQ ID NO: 1818 - protein, 15 aa, Artificial Sequence
  peptide derived from viral capsid protein
QARGLVLPGYNYLGP

SEQ ID NO: 1819 - protein, 15 aa, Artificial Sequence
  peptide derived from viral capsid protein
QEKLADDTSFGGNLG

SEQ ID NO: 1820 - protein, 15 aa, Artificial Sequence
  peptide derived from viral capsid protein
QLPYVVGNGTEGCLP

SEQ ID NO: 1821 - protein, 15 aa, Artificial Sequence
  peptide derived from viral capsid protein
RMELEGASYQVPPQP

SEQ ID NO: 1822 - protein, 15 aa, Artificial Sequence
  peptide derived from viral capsid protein
SVWMERDVYLQGPIW

SEQ ID NO: 1823 - protein, 15 aa, Artificial Sequence
  peptide derived from viral capsid protein
TGEYRTTRPIGTRYL

SEQ ID NO: 1824 - protein, 15 aa, Artificial Sequence
  peptide derived from viral capsid protein
TTTIANNLTSTVQVF

SEQ ID NO: 1825 - protein, 15 aa, Artificial Sequence
  peptide derived from viral capsid protein
VVGNGTEGCLPAFPP

SEQ ID NO: 1826 - protein, 15 aa, Artificial Sequence
  peptide derived from viral capsid protein
WMERDVYLQGPIWAK

SEQ ID NO: 1827 - protein, 15 aa, Artificial Sequence
  peptide derived from viral capsid protein
WMGDRVVTKSTRTWV

SEQ ID NO: 1828 - protein, 15 aa, Artificial Sequence
  peptide derived from viral capsid protein
YLYRFVSTNNTGGVQ

SEQ ID NO: 1829 - protein, 15 aa, Artificial Sequence
  peptide derived from viral capsid protein
ADDTSFGGNLGKAVF

SEQ ID NO: 1830 - protein, 15 aa, Artificial Sequence
  peptide derived from viral capsid protein
AKKRVLEPFGLVEEG

SEQ ID NO: 1831 - protein, 15 aa, Artificial Sequence
  peptide derived from viral capsid protein
ALENTMIFNSQPANP

SEQ ID NO: 1832 - protein, 15 aa, Artificial Sequence
  peptide derived from viral capsid protein
APDSTGEYRTTRPIG

SEQ ID NO: 1833 - protein, 15 aa, Artificial Sequence
  peptide derived from viral capsid protein
APSQNLFKLANPLVD

SEQ ID NO: 1834 - protein, 15 aa, Artificial Sequence
  peptide derived from viral capsid protein
APTGKRIDDHFPKRK

SEQ ID NO: 1835 - protein, 15 aa, Artificial Sequence
  peptide derived from viral capsid protein
ASYQVPPQPNGMTNN

SEQ ID NO: 1836 - protein, 15 aa, Artificial Sequence
  peptide derived from viral capsid protein
ATNNQSSTTAPATGT

SEQ ID NO: 1837 - protein, 15 aa, Artificial Sequence
  peptide derived from viral capsid protein
DHFPKRKKARTEEDS

SEQ ID NO: 1838 - protein, 15 aa, Artificial Sequence
  peptide derived from viral capsid protein
DTSFGGNLGKAVFQA

SEQ ID NO: 1839 - protein, 15 aa, Artificial Sequence
  peptide derived from viral capsid protein
DVPVSSFITQYSTGQ

SEQ ID NO: 1840 - protein, 15 aa, Artificial Sequence
  peptide derived from viral capsid protein
DWQRLINNYWGFRPR

SEQ ID NO: 1841 - protein, 15 aa, Artificial Sequence
  peptide derived from viral capsid protein
FPPQVFTLPQYGYAT

SEQ ID NO: 1842 - protein, 15 aa, Artificial Sequence
  peptide derived from viral capsid protein
FQAKKRVLEPFGLVE

SEQ ID NO: 1843 - protein, 15 aa, Artificial Sequence
  peptide derived from viral capsid protein
GDNNQGADGVGNASG

SEQ ID NO: 1844 - protein, 15 aa, Artificial Sequence
  peptide derived from viral capsid protein
GDRVVTKSTRTWVLP

SEQ ID NO: 1845 - protein, 15 aa, Artificial Sequence
  peptide derived from viral capsid protein
GFRPRSLRVKIFNIQ

SEQ ID NO: 1846 - protein, 15 aa, Artificial Sequence
  peptide derived from viral capsid protein
GGQMATNNQSSTTAP

SEQ ID NO: 1847 - protein, 15 aa, Artificial Sequence
  peptide derived from viral capsid protein
GSGVNRASVSAFATT

SEQ ID NO: 1848 - protein, 15 aa, Artificial Sequence
  peptide derived from viral capsid protein
GSQQLQIPAQPASSL

SEQ ID NO: 1849 - protein, 15 aa, Artificial Sequence
  peptide derived from viral capsid protein
GVNRASVSAFATTNR

SEQ ID NO: 1850 - protein, 15 aa, Artificial Sequence
  peptide derived from viral capsid protein
IKSGSVDGSNANAYF

SEQ ID NO: 1851 - protein, 15 aa, Artificial Sequence
  peptide derived from viral capsid protein
KEVTVQDSTTTIANN

SEQ ID NO: 1852 - protein, 15 aa, Artificial Sequence
  peptide derived from viral capsid protein
KKENSKRWNPEIQYT

SEQ ID NO: 1853 - protein, 15 aa, Artificial Sequence
  peptide derived from viral capsid protein
LDRGEPVNRADEVAR

SEQ ID NO: 1854 - protein, 15 aa, Artificial Sequence
  peptide derived from viral capsid protein
LGADTMSAGGGGPLG

SEQ ID NO: 1855 - protein, 15 aa, Artificial Sequence
  peptide derived from viral capsid protein
LINNYWGFRPRSLRV

SEQ ID NO: 1856 - protein, 15 aa, Artificial Sequence
  peptide derived from viral capsid protein
LREFLGLEAGPPKPK

SEQ ID NO: 1857 - protein, 15 aa, Artificial Sequence
  peptide derived from viral capsid protein
LVLPGYNYLGPGNGL

SEQ ID NO: 1858 - protein, 15 aa, Artificial Sequence
  peptide derived from viral capsid protein
NLAGRYANTYKNWFP

SEQ ID NO: 1859 - protein, 15 aa, Artificial Sequence
  peptide derived from viral capsid protein
NLFKLANPLVDQYLY

SEQ ID NO: 1860 - protein, 15 aa, Artificial Sequence
  peptide derived from viral capsid protein
NNQSSTTAPATGTYN

SEQ ID NO: 1861 - protein, 15 aa, Artificial Sequence
  peptide derived from viral capsid protein
NNTGGVQFNKNLAGR

SEQ ID NO: 1862 - protein, 15 aa, Artificial Sequence
  peptide derived from viral capsid protein
NPLVDQYLYRFVSTN

SEQ ID NO: 1863 - protein, 15 aa, Artificial Sequence
  peptide derived from viral capsid protein
NRDNTENPTERSSFF

SEQ ID NO: 1864 - protein, 15 aa, Artificial Sequence
  peptide derived from viral capsid protein
PFHSSFAPSQNLFKL

SEQ ID NO: 1865 - protein, 15 aa, Artificial Sequence
  peptide derived from viral capsid protein
PIWAKIPETGAHFHP

SEQ ID NO: 1866 - protein, 15 aa, Artificial Sequence
  peptide derived from viral capsid protein
PLGDNNQGADGVGNA

SEQ ID NO: 1867 - protein, 15 aa, Artificial Sequence
  peptide derived from viral capsid protein
PMGRTQGWNLGSGVN

SEQ ID NO: 1868 - protein, 15 aa, Artificial Sequence
  peptide derived from viral capsid protein
PMMLIKNTPVPGNIT

SEQ ID NO: 1869 - protein, 15 aa, Artificial Sequence
  peptide derived from viral capsid protein
PQPNGMTNNLQGSNT

SEQ ID NO: 1870 - protein, 15 aa, Artificial Sequence
  peptide derived from viral capsid protein
QGPIWAKIPETGAHF

SEQ ID NO: 1871 - protein, 15 aa, Artificial Sequence
  peptide derived from viral capsid protein
QGSNTYALENTMIFN

SEQ ID NO: 1872 - protein, 15 aa, Artificial Sequence
  peptide derived from viral capsid protein
QPVNRVAYNVGGQMA

SEQ ID NO: 1873 - protein, 15 aa, Artificial Sequence
  peptide derived from viral capsid protein
QVKEVTVQDSTTTIA

SEQ ID NO: 1874 - protein, 15 aa, Artificial Sequence
  peptide derived from viral capsid protein
REIKSGSVDGSNANA

SEQ ID NO: 1875 - protein, 15 aa, Artificial Sequence
  peptide derived from viral capsid protein
RTTRPIGTRYLTRPL

SEQ ID NO: 1876 - protein, 15 aa, Artificial Sequence
  peptide derived from viral capsid protein
RWNPEIQYTNNYNDP

SEQ ID NO: 1877 - protein, 15 aa, Artificial Sequence
  peptide derived from viral capsid protein
RYANTYKNWFPGPMG

SEQ ID NO: 1878 - protein, 15 aa, Artificial Sequence
  peptide derived from viral capsid protein
SFFCLEYFPSKMLRT

SEQ ID NO: 1879 - protein, 15 aa, Artificial Sequence
  peptide derived from viral capsid protein
SFGGNLGKAVFQAKK

SEQ ID NO: 1880 - protein, 15 aa, Artificial Sequence
  peptide derived from viral capsid protein
SNANAYFGYSTPWGY

SEQ ID NO: 1881 - protein, 15 aa, Artificial Sequence
  peptide derived from viral capsid protein
SNTYALENTMIFNSQ

SEQ ID NO: 1882 - protein, 15 aa, Artificial Sequence
  peptide derived from viral capsid protein
SQNLFKLANPLVDQY

SEQ ID NO: 1883 - protein, 15 aa, Artificial Sequence
  peptide derived from viral capsid protein
SVDGSNANAYFGYST

SEQ ID NO: 1884 - protein, 15 aa, Artificial Sequence
  peptide derived from viral capsid protein
TGTYNLQEIVPGSVW

SEQ ID NO: 1885 - protein, 15 aa, Artificial Sequence
  peptide derived from viral capsid protein
TLNRDNTENPTERSS

SEQ ID NO: 1886 - protein, 15 aa, Artificial Sequence
  peptide derived from viral capsid protein
TSESETQPVNRVAYN

SEQ ID NO: 1887 - protein, 15 aa, Artificial Sequence
  peptide derived from viral capsid protein
TYKNWFPGPMGRTQG

SEQ ID NO: 1888 - protein, 15 aa, Artificial Sequence
  peptide derived from viral capsid protein
YATLNRDNTENPTER

SEQ ID NO: 1889 - protein, 15 aa, Artificial Sequence
  peptide derived from viral capsid protein
YGYATLNRDNTENPT

SEQ ID NO: 1890 - protein, 15 aa, Artificial Sequence
  peptide derived from viral capsid protein
YRFVSTNNTGGVQFN

SEQ ID NO: 1891 - protein, 15 aa, Artificial Sequence
  peptide derived from viral capsid protein
YSTPWGYFDFNRFHS

SEQ ID NO: 1892 - protein, 14 aa, Artificial Sequence
  peptide derived from viral capsid protein
DSQWLGDRVITTST

SEQ ID NO: 1893 - protein, 14 aa, Artificial Sequence
  peptide derived from viral capsid protein
DTNGVYSEPRPIGT

SEQ ID NO: 1894 - protein, 14 aa, Artificial Sequence
  peptide derived from viral capsid protein
STNLQRGNLALGET

SEQ ID NO: 1895 - protein, 14 aa, Artificial Sequence
  peptide derived from viral capsid protein
ANNLTSTVQIFADS

SEQ ID NO: 1896 - protein, 14 aa, Artificial Sequence
  peptide derived from viral capsid protein
KIFNIQVKEVTTSN

SEQ ID NO: 1897 - protein, 14 aa, Artificial Sequence
  peptide derived from viral capsid protein
GNTSQQQTDRNAFY

SEQ ID NO: 1898 - protein, 14 aa, Artificial Sequence
  peptide derived from viral capsid protein
LEDNLSEGIREWWD

SEQ ID NO: 1899 - protein, 14 aa, Artificial Sequence
  peptide derived from viral capsid protein
SESVPDPQPIGEPP

SEQ ID NO: 1900 - protein, 14 aa, Artificial Sequence
  peptide derived from viral capsid protein
LIKNTPVPADPPTT

SEQ ID NO: 1901 - protein, 14 aa, Artificial Sequence
  peptide derived from viral capsid protein
PQYGYLTLNNGSQA

SEQ ID NO: 1902 - protein, 14 aa, Artificial Sequence
  peptide derived from viral capsid protein
DEEEIRTTNPVATE

SEQ ID NO: 1903 - protein, 14 aa, Artificial Sequence
  peptide derived from viral capsid protein
NYNKSVNVDFTVDT

SEQ ID NO: 1904 - protein, 14 aa, Artificial Sequence
  peptide derived from viral capsid protein
YHLNGRDSLVNPGP

SEQ ID NO: 1905 - protein, 14 aa, Artificial Sequence
  peptide derived from viral capsid protein
TRPATAPQIGTVNS

SEQ ID NO: 1906 - protein, 14 aa, Artificial Sequence
  peptide derived from viral capsid protein
GETTRPATAAQTQV

SEQ ID NO: 1907 - protein, 14 aa, Artificial Sequence
  peptide derived from viral capsid protein
IFNIQVKEVTTSNG

SEQ ID NO: 1908 - protein, 14 aa, Artificial Sequence
  peptide derived from viral capsid protein
SNSQLIFAGPNPSG

SEQ ID NO: 1909 - protein, 14 aa, Artificial Sequence
  peptide derived from viral capsid protein
TTTSSNNLLFTSEE

SEQ ID NO: 1910 - protein, 14 aa, Artificial Sequence
  peptide derived from viral capsid protein
FNIQVKEVTTNDGV

SEQ ID NO: 1911 - protein, 14 aa, Artificial Sequence
  peptide derived from viral capsid protein
GQTGDSESVPDPQP

SEQ ID NO: 1912 - protein, 14 aa, Artificial Sequence
  peptide derived from viral capsid protein
PQILIKNTPVPADP

SEQ ID NO: 1913 - protein, 14 aa, Artificial Sequence
  peptide derived from viral capsid protein
QLKAGDNPYLRYNH

SEQ ID NO: 1914 - protein, 14 aa, Artificial Sequence
  peptide derived from viral capsid protein
SFITQYSTGQVSVE

SEQ ID NO: 1915 - protein, 14 aa, Artificial Sequence
  peptide derived from viral capsid protein
FGKQGAGRDNVDYS

SEQ ID NO: 1916 - protein, 14 aa, Artificial Sequence
  peptide derived from viral capsid protein
YYKSTNVDFAVNTE

SEQ ID NO: 1917 - protein, 14 aa, Artificial Sequence
  peptide derived from viral capsid protein
HYFGYSTPWGYFDF

SEQ ID NO: 1918 - protein, 14 aa, Artificial Sequence
  peptide derived from viral capsid protein
APGKKRPVDQSPQE

SEQ ID NO: 1919 - protein, 14 aa, Artificial Sequence
  peptide derived from viral capsid protein
GKKRPVDQSPQEPD

SEQ ID NO: 1920 - protein, 14 aa, Artificial Sequence
  peptide derived from viral capsid protein
KTAPGKKRPVDQSP

SEQ ID NO: 1921 - protein, 14 aa, Artificial Sequence
  peptide derived from viral capsid protein
PEIQYTSNYNKSVN

SEQ ID NO: 1922 - protein, 14 aa, Artificial Sequence
  peptide derived from viral capsid protein
SESVPDPQPLGEPP

SEQ ID NO: 1923 - protein, 14 aa, Artificial Sequence
  peptide derived from viral capsid protein
TAPGKKRPVDQSPQ

SEQ ID NO: 1924 - protein, 14 aa, Artificial Sequence
  peptide derived from viral capsid protein
YDQQLKAGDNPYLK

SEQ ID NO: 1925 - protein, 14 aa, Artificial Sequence
  peptide derived from viral capsid protein
YLYYLNRTQGTTSG

SEQ ID NO: 1926 - protein, 14 aa, Artificial Sequence
  peptide derived from viral capsid protein
DKAYDRQLDSGDNP

SEQ ID NO: 1927 - protein, 14 aa, Artificial Sequence
  peptide derived from viral capsid protein
GTNTMATGSGAPMA

SEQ ID NO: 1928 - protein, 14 aa, Artificial Sequence
  peptide derived from viral capsid protein
DKAYDQQLQAGDNP

SEQ ID NO: 1929 - protein, 14 aa, Artificial Sequence
  peptide derived from viral capsid protein
TESVPDPQPIGEPP

SEQ ID NO: 1930 - protein, 14 aa, Artificial Sequence
  peptide derived from viral capsid protein
KNTPVPADPPTTES

SEQ ID NO: 1931 - protein, 14 aa, Artificial Sequence
  peptide derived from viral capsid protein
PVPADPPTTESQAK

SEQ ID NO: 1932 - protein, 14 aa, Artificial Sequence
  peptide derived from viral capsid protein
DEEEIKATNPVATE

SEQ ID NO: 1933 - protein, 14 aa, Artificial Sequence
  peptide derived from viral capsid protein
DKDKFFPMSGVMIF

SEQ ID NO: 1934 - protein, 14 aa, Artificial Sequence
  peptide derived from viral capsid protein
LQQQNTAPQIGTVN

SEQ ID NO: 1935 - protein, 14 aa, Artificial Sequence
  peptide derived from viral capsid protein
EEEIKTTNPVATEE

SEQ ID NO: 1936 - protein, 14 aa, Artificial Sequence
  peptide derived from viral capsid protein
GQNNNSNFAWTAGT

SEQ ID NO: 1937 - protein, 14 aa, Artificial Sequence
  peptide derived from viral capsid protein
DDEDKFFPMSGVMI

SEQ ID NO: 1938 - protein, 14 aa, Artificial Sequence
  peptide derived from viral capsid protein
PLVDQYLYRFVSTN

SEQ ID NO: 1939 - protein, 14 aa, Artificial Sequence
  peptide derived from viral capsid protein
ADPPTTFSQAKLAS

SEQ ID NO: 1940 - protein, 14 aa, Artificial Sequence
  peptide derived from viral capsid protein
DAAALEHDKAYDQQ

SEQ ID NO: 1941 - protein, 14 aa, Artificial Sequence
  peptide derived from viral capsid protein
DKAYDQQLKAGDNP

SEQ ID NO: 1942 - protein, 14 aa, Artificial Sequence
  peptide derived from viral capsid protein
DSESVPDPQPIGEP

SEQ ID NO: 1943 - protein, 14 aa, Artificial Sequence
  peptide derived from viral capsid protein
DWLEDNLSEGIREW

SEQ ID NO: 1944 - protein, 14 aa, Artificial Sequence
  peptide derived from viral capsid protein
EDNLSEGIREWWDL

SEQ ID NO: 1945 - protein, 14 aa, Artificial Sequence
  peptide derived from viral capsid protein
EEIKTTNPVATEQY

SEQ ID NO: 1946 - protein, 14 aa, Artificial Sequence
  peptide derived from viral capsid protein
ENSKRWNPEIQYTS

SEQ ID NO: 1947 - protein, 14 aa, Artificial Sequence
  peptide derived from viral capsid protein
ESVPDPQPIGEPPA

SEQ ID NO: 1948 - protein, 14 aa, Artificial Sequence
  peptide derived from viral capsid protein
EYQLPYVLGSAHQG

SEQ ID NO: 1949 - protein, 14 aa, Artificial Sequence
  peptide derived from viral capsid protein
FQERLQEDTSFGGN

SEQ ID NO: 1950 - protein, 14 aa, Artificial Sequence
  peptide derived from viral capsid protein
GDSESVPDPQPIGE

SEQ ID NO: 1951 - protein, 14 aa, Artificial Sequence
  peptide derived from viral capsid protein
HSQSLDRLMNPLID

SEQ ID NO: 1952 - protein, 14 aa, Artificial Sequence
  peptide derived from viral capsid protein
KGEPVNAADAAALE

SEQ ID NO: 1953 - protein, 14 aa, Artificial Sequence
  peptide derived from viral capsid protein
KNTPVPADPPTTFS

SEQ ID NO: 1954 - protein, 14 aa, Artificial Sequence
  peptide derived from viral capsid protein
LPYVLGSAHQGCLP

SEQ ID NO: 1955 - protein, 14 aa, Artificial Sequence
  peptide derived from viral capsid protein
LQQQNAAPIVGAVN

SEQ ID NO: 1956 - protein, 14 aa, Artificial Sequence
  peptide derived from viral capsid protein
NAADAAALEHDKAY

SEQ ID NO: 1957 - protein, 14 aa, Artificial Sequence
  peptide derived from viral capsid protein
NPGVAMATHKDDEE

SEQ ID NO: 1958 - protein, 14 aa, Artificial Sequence
  peptide derived from viral capsid protein
PGAPKPKANQQKQD

SEQ ID NO: 1959 - protein, 14 aa, Artificial Sequence
  peptide derived from viral capsid protein
PPQILIKNTPVPAD

SEQ ID NO: 1960 - protein, 14 aa, Artificial Sequence
  peptide derived from viral capsid protein
PRDWQRLINNNWGF

SEQ ID NO: 1961 - protein, 14 aa, Artificial Sequence
  peptide derived from viral capsid protein
PWGYFDFNRFHCHF

SEQ ID NO: 1962 - protein, 14 aa, Artificial Sequence
  peptide derived from viral capsid protein
QLPYVLGSAHQGCL

SEQ ID NO: 1963 - protein, 14 aa, Artificial Sequence
  peptide derived from viral capsid protein
QQRVSTTLSQNNNS

SEQ ID NO: 1964 - protein, 14 aa, Artificial Sequence
  peptide derived from viral capsid protein
SEPRPIGTRYLTRN

SEQ ID NO: 1965 - protein, 14 aa, Artificial Sequence
  peptide derived from viral capsid protein
SGGSTNDNTYFGYS

SEQ ID NO: 1966 - protein, 14 aa, Artificial Sequence
  peptide derived from viral capsid protein
SQSLDRLMNPLIDQ

SEQ ID NO: 1967 - protein, 14 aa, Artificial Sequence
  peptide derived from viral capsid protein
TGDSESVPDPQPIG

SEQ ID NO: 1968 - protein, 14 aa, Artificial Sequence
  peptide derived from viral capsid protein
TIANNLTSTIQVFT

SEQ ID NO: 1969 - protein, 14 aa, Artificial Sequence
  peptide derived from viral capsid protein
TQYSTGQVSVEIEW

SEQ ID NO: 1970 - protein, 14 aa, Artificial Sequence
  peptide derived from viral capsid protein
VTQNEGTKTIANNL

SEQ ID NO: 1971 - protein, 14 aa, Artificial Sequence
  peptide derived from viral capsid protein
WLEDNLSEGIREWW

SEQ ID NO: 1972 - protein, 14 aa, Artificial Sequence
  peptide derived from viral capsid protein
YFGYSTPWGYFDFN

SEQ ID NO: 1973 - protein, 14 aa, Artificial Sequence
  peptide derived from viral capsid protein
LSRTQSTGGTQGTQ

SEQ ID NO: 1974 - protein, 14 aa, Artificial Sequence
  peptide derived from viral capsid protein
TQGTQQLLFSQAGP

SEQ ID NO: 1975 - protein, 14 aa, Artificial Sequence
  peptide derived from viral capsid protein
DAEFQERLKEDTSF

SEQ ID NO: 1976 - protein, 14 aa, Artificial Sequence
  peptide derived from viral capsid protein
DDEEKFFPMHGNLI

SEQ ID NO: 1977 - protein, 14 aa, Artificial Sequence
  peptide derived from viral capsid protein
DGHFHPSPLMGGFG

SEQ ID NO: 1978 - protein, 14 aa, Artificial Sequence
  peptide derived from viral capsid protein
DSESVPDPQPLGEP

SEQ ID NO: 1979 - protein, 14 aa, Artificial Sequence
  peptide derived from viral capsid protein
EEEIRTTNPVATEQ

SEQ ID NO: 1980 - protein, 14 aa, Artificial Sequence
  peptide derived from viral capsid protein
EEIRTTNPVATEQY

SEQ ID NO: 1981 - protein, 14 aa, Artificial Sequence
  peptide derived from viral capsid protein
FQERLKEDTSFGGN

SEQ ID NO: 1982 - protein, 14 aa, Artificial Sequence
  peptide derived from viral capsid protein
GADGVGNSSGNWHC

SEQ ID NO: 1983 - protein, 14 aa, Artificial Sequence
  peptide derived from viral capsid protein
GDSESVPDPQPLGE

SEQ ID NO: 1984 - protein, 14 aa, Artificial Sequence
  peptide derived from viral capsid protein
GNGLDKGEPVNAAD

SEQ ID NO: 1985 - protein, 14 aa, Artificial Sequence
  peptide derived from viral capsid protein
KKRPVDQSPQEPDS

SEQ ID NO: 1986 - protein, 14 aa, Artificial Sequence
  peptide derived from viral capsid protein
KRPVDQSPQEPDSS

SEQ ID NO: 1987 - protein, 14 aa, Artificial Sequence
  peptide derived from viral capsid protein
KSVNVDFTVDTNGV

SEQ ID NO: 1988 - protein, 14 aa, Artificial Sequence
  peptide derived from viral capsid protein
LSKTANDNNNSNFP

SEQ ID NO: 1989 - protein, 14 aa, Artificial Sequence
  peptide derived from viral capsid protein
MASHKDDEEKFFPM

SEQ ID NO: 1990 - protein, 14 aa, Artificial Sequence
  peptide derived from viral capsid protein
NNFQFSYTFEDVPF

SEQ ID NO: 1991 - protein, 14 aa, Artificial Sequence
  peptide derived from viral capsid protein
PVDQSPQEPDSSSG

SEQ ID NO: 1992 - protein, 14 aa, Artificial Sequence
  peptide derived from viral capsid protein
PVPANPPTTFSPAK

SEQ ID NO: 1993 - protein, 14 aa, Artificial Sequence
  peptide derived from viral capsid protein
QQRLSKTANDNNNS

SEQ ID NO: 1994 - protein, 14 aa, Artificial Sequence
  peptide derived from viral capsid protein
QSSNTAPTTRTVND

SEQ ID NO: 1995 - protein, 14 aa, Artificial Sequence
  peptide derived from viral capsid protein
SKTANDNNNSNFPW

SEQ ID NO: 1996 - protein, 14 aa, Artificial Sequence
  peptide derived from viral capsid protein
SNYNKSVNVDFTVD

SEQ ID NO: 1997 - protein, 14 aa, Artificial Sequence
  peptide derived from viral capsid protein
TTSGTTNQSRLLFS

SEQ ID NO: 1998 - protein, 14 aa, Artificial Sequence
  peptide derived from viral capsid protein
VMITDEEEIRTTNP

SEQ ID NO: 1999 - protein, 14 aa, Artificial Sequence
  peptide derived from viral capsid protein
APGKKRPVEHSPVE

SEQ ID NO: 2000 - protein, 14 aa, Artificial Sequence
  peptide derived from viral capsid protein
FFPQSGVLIFGKQG

SEQ ID NO: 2001 - protein, 14 aa, Artificial Sequence
  peptide derived from viral capsid protein
FGKQGSEKTNVDIE

SEQ ID NO: 2002 - protein, 14 aa, Artificial Sequence
  peptide derived from viral capsid protein
HKDDEEKFFPQSGV

SEQ ID NO: 2003 - protein, 14 aa, Artificial Sequence
  peptide derived from viral capsid protein
KGEPVNEADAAALE

SEQ ID NO: 2004 - protein, 14 aa, Artificial Sequence
  peptide derived from viral capsid protein
NEADAAALEHDKAY

SEQ ID NO: 2005 - protein, 14 aa, Artificial Sequence
  peptide derived from viral capsid protein
NPVATEQYGSVSTN

SEQ ID NO: 2006 - protein, 14 aa, Artificial Sequence
  peptide derived from viral capsid protein
PQILIKNTPVPANP

SEQ ID NO: 2007 - protein, 14 aa, Artificial Sequence
  peptide derived from viral capsid protein
QQRVSKTSADNNNS

SEQ ID NO: 2008 - protein, 14 aa, Artificial Sequence
  peptide derived from viral capsid protein
QTGDADSVPDPQPL

SEQ ID NO: 2009 - protein, 14 aa, Artificial Sequence
  peptide derived from viral capsid protein
ADPPTTFNQAKLAS

SEQ ID NO: 2010 - protein, 14 aa, Artificial Sequence
  peptide derived from viral capsid protein
AGDNVDYSSVMLTS

SEQ ID NO: 2011 - protein, 14 aa, Artificial Sequence
  peptide derived from viral capsid protein
KNTPVPADPPTTFN

SEQ ID NO: 2012 - protein, 14 aa, Artificial Sequence
  peptide derived from viral capsid protein
KRVLEPLGLVESPV

SEQ ID NO: 2013 - protein, 14 aa, Artificial Sequence
  peptide derived from viral capsid protein
PYLRYHADAEFQER

SEQ ID NO: 2014 - protein, 14 aa, Artificial Sequence
  peptide derived from viral capsid protein
EEEIKTTNPVATES

SEQ ID NO: 2015 - protein, 14 aa, Artificial Sequence
  peptide derived from viral capsid protein
EFAWPGASSWALNG

SEQ ID NO: 2016 - protein, 14 aa, Artificial Sequence
  peptide derived from viral capsid protein
KSNNVEFAVNTEGV

SEQ ID NO: 2017 - protein, 14 aa, Artificial Sequence
  peptide derived from viral capsid protein
MNPGPAMASHKEGE

SEQ ID NO: 2018 - protein, 14 aa, Artificial Sequence
  peptide derived from viral capsid protein
PVPADPPTAFNKDK

SEQ ID NO: 2019 - protein, 14 aa, Artificial Sequence
  peptide derived from viral capsid protein
TVQVFTDSDYQLPY

SEQ ID NO: 2020 - protein, 14 aa, Artificial Sequence
  peptide derived from viral capsid protein
NLQAANLALGETTR

SEQ ID NO: 2021 - protein, 14 aa, Artificial Sequence
  peptide derived from viral capsid protein
GGQMATNNQSLALG

SEQ ID NO: 2022 - protein, 14 aa, Artificial Sequence
  peptide derived from viral capsid protein
MATNNQSLALGETT

SEQ ID NO: 2023 - protein, 14 aa, Artificial Sequence
  peptide derived from viral capsid protein
KKRILEPLGLVEEA

SEQ ID NO: 2024 - protein, 14 aa, Artificial Sequence
  peptide derived from viral capsid protein
ADPPTTFNQSKLNS

SEQ ID NO: 2025 - protein, 14 aa, Artificial Sequence
  peptide derived from viral capsid protein
KSTSVDFAVNTEGV

SEQ ID NO: 2026 - protein, 14 aa, Artificial Sequence
  peptide derived from viral capsid protein
LQRGNRQAATADVN

SEQ ID NO: 2027 - protein, 14 aa, Artificial Sequence
  peptide derived from viral capsid protein
PVPADPPTTFNQSK

SEQ ID NO: 2028 - protein, 14 aa, Artificial Sequence
  peptide derived from viral capsid protein
DDDDRFFPMHGNLI

SEQ ID NO: 2029 - protein, 14 aa, Artificial Sequence
  peptide derived from viral capsid protein
PEPADVFMIPQYGY

SEQ ID NO: 2030 - protein, 14 aa, Artificial Sequence
  peptide derived from viral capsid protein
DIYYQGPIWAKVPH

SEQ ID NO: 2031 - protein, 14 aa, Artificial Sequence
  peptide derived from viral capsid protein
FEKVPFHSMYAHSQ

SEQ ID NO: 2032 - protein, 14 aa, Artificial Sequence
  peptide derived from viral capsid protein
FSAARINSFLTQYS

SEQ ID NO: 2033 - protein, 14 aa, Artificial Sequence
  peptide derived from viral capsid protein
HSQSLDRMMNPLLD

SEQ ID NO: 2034 - protein, 14 aa, Artificial Sequence
  peptide derived from viral capsid protein
KKRILEPLGLVEEG

SEQ ID NO: 2035 - protein, 14 aa, Artificial Sequence
  peptide derived from viral capsid protein
MVPQYGYCGVVTGK

SEQ ID NO: 2036 - protein, 14 aa, Artificial Sequence
  peptide derived from viral capsid protein
NQTDRNAFYCLEYF

SEQ ID NO: 2037 - protein, 14 aa, Artificial Sequence
  peptide derived from viral capsid protein
RDTDMFGQIADNNQ

SEQ ID NO: 2038 - protein, 14 aa, Artificial Sequence
  peptide derived from viral capsid protein
RDWQRLINNNWGLR

SEQ ID NO: 2039 - protein, 14 aa, Artificial Sequence
  peptide derived from viral capsid protein
TVQIFADSTYELPY

SEQ ID NO: 2040 - protein, 14 aa, Artificial Sequence
  peptide derived from viral capsid protein
DIYYQGPIWAKIPH

SEQ ID NO: 2041 - protein, 14 aa, Artificial Sequence
  peptide derived from viral capsid protein
QIFADSSYELPYVM

SEQ ID NO: 2042 - protein, 14 aa, Artificial Sequence
  peptide derived from viral capsid protein
THSTLDGRWSALTP

SEQ ID NO: 2043 - protein, 14 aa, Artificial Sequence
  peptide derived from viral capsid protein
TVQIFADSSYELPY

SEQ ID NO: 2044 - protein, 14 aa, Artificial Sequence
  peptide derived from viral capsid protein
DKFFPMSGVMIFGK

SEQ ID NO: 2045 - protein, 14 aa, Artificial Sequence
  peptide derived from viral capsid protein
EEEIKATNPVATER

SEQ ID NO: 2046 - protein, 14 aa, Artificial Sequence
  peptide derived from viral capsid protein
EGADGVGNASGNWH

SEQ ID NO: 2047 - protein, 14 aa, Artificial Sequence
  peptide derived from viral capsid protein
LFNIQVKEVTTNDG

SEQ ID NO: 2048 - protein, 14 aa, Artificial Sequence
  peptide derived from viral capsid protein
QVKEVTTNDGVTTI

SEQ ID NO: 2049 - protein, 14 aa, Artificial Sequence
  peptide derived from viral capsid protein
RVSKTKTDNNNSNF

SEQ ID NO: 2050 - protein, 14 aa, Artificial Sequence
  peptide derived from viral capsid protein
SDSEYQLPYVLGSA

SEQ ID NO: 2051 - protein, 14 aa, Artificial Sequence
  peptide derived from viral capsid protein
HSQSLDRLMNPLLD

SEQ ID NO: 2052 - protein, 14 aa, Artificial Sequence
  peptide derived from viral capsid protein
IEMRAAPGGNAVDA

SEQ ID NO: 2053 - protein, 14 aa, Artificial Sequence
  peptide derived from viral capsid protein
KRLNFEEDTGAGDG

SEQ ID NO: 2054 - protein, 14 aa, Artificial Sequence
  peptide derived from viral capsid protein
SQSLDRLMNPLLDQ

SEQ ID NO: 2055 - protein, 14 aa, Artificial Sequence
  peptide derived from viral capsid protein
STGQVAVQIEWEIE

SEQ ID NO: 2056 - protein, 14 aa, Artificial Sequence
  peptide derived from viral capsid protein
TTSANNLLFTSEEE

SEQ ID NO: 2057 - protein, 14 aa, Artificial Sequence
  peptide derived from viral capsid protein
TTSGETLNQGNAAT

SEQ ID NO: 2058 - protein, 14 aa, Artificial Sequence
  peptide derived from viral capsid protein
GESESVPDPQPIGE

SEQ ID NO: 2059 - protein, 14 aa, Artificial Sequence
  peptide derived from viral capsid protein
GQTGESESVPDPQP

SEQ ID NO: 2060 - protein, 14 aa, Artificial Sequence
  peptide derived from viral capsid protein
ANPGIAMATHKDDE

SEQ ID NO: 2061 - protein, 14 aa, Artificial Sequence
  peptide derived from viral capsid protein
EGASYQVPPQPNGM

SEQ ID NO: 2062 - protein, 14 aa, Artificial Sequence
  peptide derived from viral capsid protein
EYRTTRPIGTRYLT

SEQ ID NO: 2063 - protein, 14 aa, Artificial Sequence
  peptide derived from viral capsid protein
YNLQEIVPGSVWME

SEQ ID NO: 2064 - protein, 15 aa, Artificial Sequence
  peptide derived from viral capsid protein
ADTMSAGGGGPLGDN

SEQ ID NO: 2065 - protein, 15 aa, Artificial Sequence
  peptide derived from viral capsid protein
AKTAPGKKRPVEPSP

SEQ ID NO: 2066 - protein, 15 aa, Artificial Sequence
  peptide derived from viral capsid protein
DVYLQGPIWAKIPET

SEQ ID NO: 2067 - protein, 15 aa, Artificial Sequence
  peptide derived from viral capsid protein
GAKTAPTGKRIDDHF

SEQ ID NO: 2068 - protein, 15 aa, Artificial Sequence
  peptide derived from viral capsid protein
GQVATNHQSAQAQAQ

SEQ ID NO: 2069 - protein, 15 aa, Artificial Sequence
  peptide derived from viral capsid protein
KTAPTGKRIDDHFPK

SEQ ID NO: 2070 - protein, 15 aa, Artificial Sequence
  peptide derived from viral capsid protein
MNPLIDQYLYYLSKT

SEQ ID NO: 2071 - protein, 15 aa, Artificial Sequence
  peptide derived from viral capsid protein
NHQYREIKSGSVDGS

SEQ ID NO: 2072 - protein, 15 aa, Artificial Sequence
  peptide derived from viral capsid protein
PTTFNQSKLNSFITQ

SEQ ID NO: 2073 - protein, 15 aa, Artificial Sequence
  peptide derived from viral capsid protein
QYREIKSGSVDGSNA

SEQ ID NO: 2074 - protein, 15 aa, Artificial Sequence
  peptide derived from viral capsid protein
SYAHSQSLDRLMNPL

SEQ ID NO: 2075 - protein, 15 aa, Artificial Sequence
  peptide derived from viral capsid protein
VYSEPRPIGTRYLTR

SEQ ID NO: 2076 - protein, 15 aa, Artificial Sequence
  peptide derived from viral capsid protein
YLQGPIWAKIPETGA

SEQ ID NO: 2077 - protein, 15 aa, Artificial Sequence
  peptide derived from viral capsid protein
DSSSGTGKAGQQPAR

SEQ ID NO: 2078 - protein, 15 aa, Artificial Sequence
  peptide derived from viral capsid protein
GVVADNLQQQNAAPI

SEQ ID NO: 2079 - protein, 15 aa, Artificial Sequence
  peptide derived from viral capsid protein
HSSFAPSQNLFKLAN

SEQ ID NO: 2080 - protein, 15 aa, Artificial Sequence
  peptide derived from viral capsid protein
KDKLNSFITQYSTGQ

SEQ ID NO: 2081 - protein, 15 aa, Artificial Sequence
  peptide derived from viral capsid protein
KRWNPEIQYTSNYYK

SEQ ID NO: 2082 - protein, 15 aa, Artificial Sequence
  peptide derived from viral capsid protein
LEAGDNPYLKYNHAD

SEQ ID NO: 2083 - protein, 15 aa, Artificial Sequence
  peptide derived from viral capsid protein
LKYNHADAEFQEKLA

SEQ ID NO: 2084 - protein, 15 aa, Artificial Sequence
  peptide derived from viral capsid protein
NSQGALPGMVWQNRD

SEQ ID NO: 2085 - protein, 15 aa, Artificial Sequence
  peptide derived from viral capsid protein
PADPPTTFNQSKLNS

SEQ ID NO: 2086 - protein, 15 aa, Artificial Sequence
  peptide derived from viral capsid protein
PPAGPSGLGSGTMAA

SEQ ID NO: 2087 - protein, 15 aa, Artificial Sequence
  peptide derived from viral capsid protein
PYLKYNHADAEFQEK

SEQ ID NO: 2088 - protein, 15 aa, Artificial Sequence
  peptide derived from viral capsid protein
QSGASNDNHYFGYST

SEQ ID NO: 2089 - protein, 15 aa, Artificial Sequence
  peptide derived from viral capsid protein
QSTGGTAGTQQLLFS

SEQ ID NO: 2090 - protein, 15 aa, Artificial Sequence
  peptide derived from viral capsid protein
QYGVVADNLQQQNAA

SEQ ID NO: 2091 - protein, 15 aa, Artificial Sequence
  peptide derived from viral capsid protein
RWNPEIQYTSNYYKS

SEQ ID NO: 2092 - protein, 15 aa, Artificial Sequence
  peptide derived from viral capsid protein
SFAPSQNLFKLANPL

SEQ ID NO: 2093 - protein, 15 aa, Artificial Sequence
  peptide derived from viral capsid protein
SKRWNPEIQYTSNYY

SEQ ID NO: 2094 - protein, 15 aa, Artificial Sequence
  peptide derived from viral capsid protein
SQSGASNDNHYFGYS

SEQ ID NO: 2095 - protein, 15 aa, Artificial Sequence
  peptide derived from viral capsid protein
SRTNTPSGTTTQSRL

SEQ ID NO: 2096 - protein, 15 aa, Artificial Sequence
  peptide derived from viral capsid protein
SYGQVATNHQSAQAQ

SEQ ID NO: 2097 - protein, 15 aa, Artificial Sequence
  peptide derived from viral capsid protein
TANTQTLGFSQGGPN

SEQ ID NO: 2098 - protein, 15 aa, Artificial Sequence
  peptide derived from viral capsid protein
TEQYGVVADNLQQQN

SEQ ID NO: 2099 - protein, 15 aa, Artificial Sequence
  peptide derived from viral capsid protein
TGQNNNSNFAWTAGT

SEQ ID NO: 2100 - protein, 15 aa, Artificial Sequence
  peptide derived from viral capsid protein
TTNPVATESYGQVAT

SEQ ID NO: 2101 - protein, 15 aa, Artificial Sequence
  peptide derived from viral capsid protein
WTGATKYHLNGRDSL

SEQ ID NO: 2102 - protein, 15 aa, Artificial Sequence
  peptide derived from viral capsid protein
YAHSQSLDRLMNPLI

SEQ ID NO: 2103 - protein, 15 aa, Artificial Sequence
  peptide derived from viral capsid protein
YTSNYYKSNNVEFAV

SEQ ID NO: 2104 - protein, 14 aa, Artificial Sequence
  peptide derived from viral capsid protein
AAEAAAPAAQPEVE

SEQ ID NO: 2105 - protein, 14 aa, Artificial Sequence
  peptide derived from viral capsid protein
AAAPAAQPEVEKPQ

SEQ ID NO: 2106 - protein, 14 aa, Artificial Sequence
  peptide derived from viral capsid protein
DASEYLSPGLVQFA

SEQ ID NO: 2107 - protein, 14 aa, Artificial Sequence
  peptide derived from viral capsid protein
DGLEFGSPNAPNTN

SEQ ID NO: 2108 - protein, 14 aa, Artificial Sequence
  peptide derived from viral capsid protein
APVAAALGSPFDAP

SEQ ID NO: 2109 - protein, 14 aa, Artificial Sequence
  peptide derived from viral capsid protein
NLEEEDDDNEDEVD

SEQ ID NO: 2110 - protein, 14 aa, Artificial Sequence
  peptide derived from viral capsid protein
EEDDDNEDEVDEQA

SEQ ID NO: 2111 - protein, 14 aa, Artificial Sequence
  peptide derived from viral capsid protein
DDNEDEVDEQAEQQ

SEQ ID NO: 2112 - protein, 14 aa, Artificial Sequence
  peptide derived from viral capsid protein
VLQSSLGNDLRVDG

SEQ ID NO: 2113 - protein, 14 aa, Artificial Sequence
  peptide derived from viral capsid protein
PSEDTFNPVYPYDT

SEQ ID NO: 2114 - protein, 14 aa, Artificial Sequence
  peptide derived from viral capsid protein
FPVVGAELLPVHSK

SEQ ID NO: 2115 - protein, 14 aa, Artificial Sequence
  peptide derived from viral capsid protein
EEIRPTNPVATEEY

SEQ ID NO: 2116 - protein, 14 aa, Artificial Sequence
  peptide derived from viral capsid protein
SGSGAEENSNAAAA

SEQ ID NO: 2117 - protein, 14 aa, Artificial Sequence
  peptide derived from viral capsid protein
YEEGPPPSYESVVS

SEQ ID NO: 2118 - protein, 14 aa, Artificial Sequence
  peptide derived from viral capsid protein
NAAAAAMQPVEDMN

SEQ ID NO: 2119 - protein, 14 aa, Artificial Sequence
  peptide derived from viral capsid protein
AAALGSPFDAPLDP

SEQ ID NO: 2120 - protein, 14 aa, Artificial Sequence
  peptide derived from viral capsid protein
NGVLESDIGVKFDT

SEQ ID NO: 2121 - protein, 14 aa, Artificial Sequence
  peptide derived from viral capsid protein
AAAMQPVEDMNDHA

SEQ ID NO: 2122 - protein, 14 aa, Artificial Sequence
  peptide derived from viral capsid protein
PAQPASSLGADTMS

SEQ ID NO: 2123 - protein, 14 aa, Artificial Sequence
  peptide derived from viral capsid protein
TVQVFTDDDYQLPY

SEQ ID NO: 2124 - protein, 14 aa, Artificial Sequence
  peptide derived from viral capsid protein
PVPGNITSFSDVPV

SEQ ID NO: 2125 - protein, 14 aa, Artificial Sequence
  peptide derived from viral capsid protein
TQYSTGQVTVEMEW

SEQ ID NO: 2126 - protein, 14 aa, Artificial Sequence
  peptide derived from viral capsid protein
YLGPGNGLDRGEPV

SEQ ID NO: 2127 - protein, 14 aa, Artificial Sequence
  peptide derived from viral capsid protein
TSESETQPVNRVAY

SEQ ID NO: 2128 - protein, 14 aa, Artificial Sequence
  peptide derived from viral capsid protein
RARPSEDTFNPVYP

SEQ ID NO: 2129 - protein, 14 aa, Artificial Sequence
  peptide derived from viral capsid protein
ATALEINLEEEDDD

SEQ ID NO: 2130 - protein, 14 aa, Artificial Sequence
  peptide derived from viral capsid protein
ENSNAAAAAMQPVE

SEQ ID NO: 2131 - protein, 14 aa, Artificial Sequence
  peptide derived from viral capsid protein
YLGPFNGLDKGEPV

SEQ ID NO: 2132 - protein, 14 aa, Artificial Sequence
  peptide derived from viral capsid protein
NNFEFSYSFEDVPF

SEQ ID NO: 2133 - protein, 14 aa, Artificial Sequence
  peptide derived from viral capsid protein
SFITQYSTGQVTVE

SEQ ID NO: 2134 - protein, 14 aa, Artificial Sequence
  peptide derived from viral capsid protein
YNKSVNVDFTVDTN

SEQ ID NO: 2135 - protein, 14 aa, Artificial Sequence
  peptide derived from viral capsid protein
LGSPFDAPLDPPFV

SEQ ID NO: 2136 - protein, 14 aa, Artificial Sequence
  peptide derived from viral capsid protein
PAAQPEVEKPQKKP

SEQ ID NO: 2137 - protein, 14 aa, Artificial Sequence
  peptide derived from viral capsid protein
ENSKRWNPEIQYTN

SEQ ID NO: 2138 - protein, 14 aa, Artificial Sequence
  peptide derived from viral capsid protein
YLVDNKSTDVASLN

SEQ ID NO: 2139 - protein, 14 aa, Artificial Sequence
  peptide derived from viral capsid protein
PPMMLIKNTPVPGN

SEQ ID NO: 2140 - protein, 14 aa, Artificial Sequence
  peptide derived from viral capsid protein
PVPADPPTTFSQAK

SEQ ID NO: 2141 - protein, 14 aa, Artificial Sequence
  peptide derived from viral capsid protein
DTFNPVYPYDTETG

SEQ ID NO: 2142 - protein, 14 aa, Artificial Sequence
  peptide derived from viral capsid protein
ITQYSTGQVTVEME

SEQ ID NO: 2143 - protein, 14 aa, Artificial Sequence
  peptide derived from viral capsid protein
AGNLTSQNVTTVSP

SEQ ID NO: 2144 - protein, 14 aa, Artificial Sequence
  peptide derived from viral capsid protein
NNFTFSYTFEDVPF

SEQ ID NO: 2145 - protein, 14 aa, Artificial Sequence
  peptide derived from viral capsid protein
WVLPSYNNHQYREI

SEQ ID NO: 2146 - protein, 14 aa, Artificial Sequence
  peptide derived from viral capsid protein
YLGPGNGLDKGEPV

SEQ ID NO: 2147 - protein, 14 aa, Artificial Sequence
  peptide derived from viral capsid protein
FLYSNIALYLPDKL

SEQ ID NO: 2148 - protein, 14 aa, Artificial Sequence
  peptide derived from viral capsid protein
NSTGNMGVLAGQAS

SEQ ID NO: 2149 - protein, 14 aa, Artificial Sequence
  peptide derived from viral capsid protein
YLKYNHADAEFQER

SEQ ID NO: 2150 - protein, 14 aa, Artificial Sequence
  peptide derived from viral capsid protein
LAPKGAPNPCEWDE

SEQ ID NO: 2151 - protein, 14 aa, Artificial Sequence
  peptide derived from viral capsid protein
IQYTNNYNDPQFVD

SEQ ID NO: 2152 - protein, 14 aa, Artificial Sequence
  peptide derived from viral capsid protein
SHGKTAKSNIVSQV

SEQ ID NO: 2153 - protein, 14 aa, Artificial Sequence
  peptide derived from viral capsid protein
VSAAPVAAALGSPF

SEQ ID NO: 2154 - protein, 14 aa, Artificial Sequence
  peptide derived from viral capsid protein
GNDRLLTPNEFEIK

SEQ ID NO: 2155 - protein, 14 aa, Artificial Sequence
  peptide derived from viral capsid protein
LEINLEEEDDDNED

SEQ ID NO: 2156 - protein, 14 aa, Artificial Sequence
  peptide derived from viral capsid protein
YLRYNHADAEFQER

SEQ ID NO: 2157 - protein, 14 aa, Artificial Sequence
  peptide derived from viral capsid protein
AAGGAAVEGGQGAD

SEQ ID NO: 2158 - protein, 14 aa, Artificial Sequence
  peptide derived from viral capsid protein
VKEVTTSNGETTVA

SEQ ID NO: 2159 - protein, 14 aa, Artificial Sequence
  peptide derived from viral capsid protein
EAMLRNDTNDQSFN

SEQ ID NO: 2160 - protein, 14 aa, Artificial Sequence
  peptide derived from viral capsid protein
DGHFHPSPLIGGFG

SEQ ID NO: 2161 - protein, 14 aa, Artificial Sequence
  peptide derived from viral capsid protein
NMTKDWFLVQMLAN

SEQ ID NO: 2162 - protein, 14 aa, Artificial Sequence
  peptide derived from viral capsid protein
VGSGTVAAGGGAPM

SEQ ID NO: 2163 - protein, 14 aa, Artificial Sequence
  peptide derived from viral capsid protein
EQYGTVANNLQSSN

SEQ ID NO: 2164 - protein, 14 aa, Artificial Sequence
  peptide derived from viral capsid protein
CLEYFPSKMLRTGN

SEQ ID NO: 2165 - protein, 14 aa, Artificial Sequence
  peptide derived from viral capsid protein
AHALDMTFEVDPMD

SEQ ID NO: 2166 - protein, 14 aa, Artificial Sequence
  peptide derived from viral capsid protein
TMANQAKNWLPGPC

SEQ ID NO: 2167 - protein, 14 aa, Artificial Sequence
  peptide derived from viral capsid protein
KRPVEQSPQEPDSS

SEQ ID NO: 2168 - protein, 14 aa, Artificial Sequence
  peptide derived from viral capsid protein
KTANDNNNSNFPWT

SEQ ID NO: 2169 - protein, 14 aa, Artificial Sequence
  peptide derived from viral capsid protein
TQNNNSEFAWPGAS

SEQ ID NO: 2170 - protein, 14 aa, Artificial Sequence
  peptide derived from viral capsid protein
KNTPVPADPPTAFN

SEQ ID NO: 2171 - protein, 14 aa, Artificial Sequence
  peptide derived from viral capsid protein
TVQVFSDSEYQLPY

SEQ ID NO: 2172 - protein, 14 aa, Artificial Sequence
  peptide derived from viral capsid protein
LDKGEPVNAADAAA

SEQ ID NO: 2173 - protein, 14 aa, Artificial Sequence
  peptide derived from viral capsid protein
VLEPLGLVEEPVKT

SEQ ID NO: 2174 - protein, 14 aa, Artificial Sequence
  peptide derived from viral capsid protein
KLFNIQVKEVTTND

SEQ ID NO: 2175 - protein, 14 aa, Artificial Sequence
  peptide derived from viral capsid protein
LQSSNTAPTTRTVN

SEQ ID NO: 2176 - protein, 14 aa, Artificial Sequence
  peptide derived from viral capsid protein
SPPLKKTKSNINLE

SEQ ID NO: 2177 - protein, 14 aa, Artificial Sequence
  peptide derived from viral capsid protein
LDKGEPVNEADAAA

SEQ ID NO: 2178 - protein, 14 aa, Artificial Sequence
  peptide derived from viral capsid protein
MLRTGNNFQFSYEF

SEQ ID NO: 2179 - protein, 14 aa, Artificial Sequence
  peptide derived from viral capsid protein
ARKRLNFGQTGDAD

SEQ ID NO: 2180 - protein, 14 aa, Artificial Sequence
  peptide derived from viral capsid protein
NTYNGFSTPWGYFD

SEQ ID NO: 2181 - protein, 14 aa, Artificial Sequence
  peptide derived from viral capsid protein
QYGTVANNLQSSNT

SEQ ID NO: 2182 - protein, 14 aa, Artificial Sequence
  peptide derived from viral capsid protein
LARPPAPTITTVSE

SEQ ID NO: 2183 - protein, 14 aa, Artificial Sequence
  peptide derived from viral capsid protein
FPADVFMIPQYGYL

SEQ ID NO: 2184 - protein, 14 aa, Artificial Sequence
  peptide derived from viral capsid protein
STGQVSVEIEWELQ

SEQ ID NO: 2185 - protein, 14 aa, Artificial Sequence
  peptide derived from viral capsid protein
LRNDTNDQSFNDYL

SEQ ID NO: 2186 - protein, 14 aa, Artificial Sequence
  peptide derived from viral capsid protein
NFQFSYEFENVPFH

SEQ ID NO: 2187 - protein, 14 aa, Artificial Sequence
  peptide derived from viral capsid protein
FITQYSTGQVTVEM

SEQ ID NO: 2188 - protein, 14 aa, Artificial Sequence
  peptide derived from viral capsid protein
QQPARKRLNFGQTG

SEQ ID NO: 2189 - protein, 14 aa, Artificial Sequence
  peptide derived from viral capsid protein
HDSKLSIATQGPLT

SEQ ID NO: 2190 - protein, 14 aa, Artificial Sequence
  peptide derived from viral capsid protein
NTYFGYSTPWGYFD
